(19) United States
(12) Patent Application Publication
(10) Pub. No.: US 2023/0183732 A1
(43) Pub. Date: Jun. 15, 2023

(54) STALK ROT-RESISTANT MAIZE PLANTS

(71) Applicants: AgReliant Genetics, LLC, Westfield, IN (US); Limagrain Europe S.A., Saint-Beauzire (FR); KWS SAAT SE & Co. KGaA, Einbeck (DE)

(72) Inventors: David B. WILLMOT, Westfield, IN (US); Brian D. FOSS, Westfield, IN (US); James M. JOHNSON, Whitestown, IN (US); Jordi Comadran TRABAL, Riom (FR); Daniela SCHEUERMANN, Einbeck (DE); Monika KLOIBER-MAITZ, Einbeck (DE)

(21) Appl. No.: 17/924,895

(22) PCT Filed: May 11, 2021
(86) PCT No.: PCT/US2021/031829

§ 371 Date: Nov. 11, 2022

Related U.S. Application Data
(60) Provisional application No. 63/022,868, filed on May 11, 2020.

(51) Int. Cl. C12N 15/82; C12Q 1/6895; C07K 14/415

(52) U.S. Cl. CPC C12N 15/8282; C12Q 1/6895; C07K 14/415; C12Q 2600/13; C12Q 2600/156

(57) ABSTRACT

The present disclosure is in the field of plant breeding and disease resistance. A method for the development of a corn plant enhanced for resistance to Colletotrichum graminicola and secondarily to Fusarium spp., both of which incite stalk rot disease, is provided. Also provided is a method to identify corn plants with polynucleotide sequences identified to serve as diagnostic markers for resistance to these pathogens. Further described is the introgression of desired genetic material from one or more parent plants into progeny with precision and accuracy to increase their resistance to these diseases with minimal linkage drag from the donor genome.

### CROSS-REFERENCE TO RELATED APPLICATIONS

[0001] This application claims the benefit of priority to U.S. Provisional Application No. 63/022,868 filed on May 11, 2020, which is hereby incorporated by reference in its entirety.

### DESCRIPTION OF THE TEXT FILE SUBMITTED ELECTRONICALLY

[0002] The contents of the text file submitted electronically herewith are incorporated herein by reference in their entirety: A computer readable format copy of the Sequence Listing filename: AGR-002_SeqList_20210507_6_ST25.txt, date created: May 7, 2021, file size≈0.99 MB.

### FIELD

[0003] This disclosure relates to compositions and methods useful in identifying and selecting for plants with pathogen resistance. Additionally, the disclosure relates to plants that have been genetically transformed or introgressed with compositions of the disclosure.

### BACKGROUND

[0004] Stalk rot of corn is a disease complex incited by several pathogens including Colletotrichum graminicola Ces. Wils., Fusarium verticilliodes, and related species. These pathogens incite anthracnose stalk rot (ASR) and Fusarium stalk rot, respectively. These stalk rots alone are estimated to have reduced the U.S.A. corn crop by 463.4 million bushels (11.8 million MT) in yield in 2016. See, Mueller et al., “Corn yield loss estimates due to diseases in the United States and Ontario, Canada from 2012 to 2015”, Papers in Plant Pathology, 2016, University of Nebraska—Lincoln. Stalk rot also causes extensive stalk lodging. See, Callaway et al., “Effect of anthracnose stalk rot on grain yield and related traits of maize adapted to the northeastern United States.” Canadian Journal of Plant Science, 1992, 72(4), 1031-1036. Others have cited sources of resistance against ASR. See, Badu-Apraku et al., “A major gene for resistance to stalk rot in maize.”, 1987, Phytopathology 77:957-959; Toman & White, “Inheritance of resistance to stalk rot of corn.” Phytopathology, 1993, 83:981-986; Jung el al., “Generation-means analysis and quantitative trait locus mapping of anthracnose stalk rot genes in maize.” TAG, 1994, 89:413-418.

[0005] The known resistance genes are not sufficient for the development and production of varieties with durable resistance. Cultivation of corn year by year in the same fields, as often practiced in many regions of the world, significantly increases disease severity and the tendency of pathogens to break host resistance. There is a need for new resistance sources and combinations of resistance genes to overcome resistance-breaking variants of the pathogens. The need for new and alternative sources for resistance to plant diseases, in particular to anthracnose stalk rot, is met by the subject matter disclosed in this application.

### BRIEF DESCRIPTION OF THE DRAWINGS

[0006] FIG. 1 shows a Manhattan plot of QTL results showing two ASR QTL on chromosomes 4 and 6 surpassing the empirical LOD (log of odds) significance threshold (P<0.01).

[0007] FIG. 2 shows a comparison of amplicons within the QTL on chromosome 4. Genotype 1: Mp305, described in U.S. Pat. No. 8,062,847, incorporated by reference herein in its entirety; Genotype 2: DW1035, BC5 selecting for Mp305 chromosome 4 fragment; Genotype 3: NC262A, source of the present disclosure; Genotype 4: NC342, full sib source of the present disclosure; Genotype 5: GEMN-0117, ASR tolerant check; Genotype 6: GEMS-0016, ASR tolerant check; Genotype 7: MN13, susceptible check; Genotype 8: MM69, susceptible check; Genotype 9: KW7638, susceptible check; Genotype 10: CB1, susceptible check.

[0008] FIG. 3 shows an exemplary stalk splitter. The stalk splitter has 50 cm handles for ergonomic ease, a blade above the body of the mechanism, and spring tensioned rollers below the blade which center the split stalk as it comes up through the body.

[0009] FIG. 4 shows how the exemplary stalk splitter provides a centered cut with visibility to the stalk being cut thereby revealing the degree of stalk rot inside.

[0010] FIG. 5 is a closeup view of the body of the splitter and its aluminum body with slots for the centering rollers to expand into.

[0011] FIG. 6 is a top view showing the central hole up through which the stalk emerges. The stalk is split by the cross blade as pressure is exerted downward to the ground by the handles.

### SEQUENCES

[0012] The sequences described in this application are summarized in the following table.

| SEQ ID NO: | Description |
|---|---|
| 1 | genomic DNA of Cesa2 |
| 2 | cDNA of transcript 1 derived from genomic DNA of Cesa2 |
| 3 | cDNA of transcript 2 derived from genomic DNA of Cesa2 |
| 4 | cDNA of transcript 3 derived from genomic DNA of Cesa2 |
| 5 | cDNA of transcript 4 derived from genomic DNA of Cesa2 |
| 6 | cDNA of transcript 5 derived from genomic DNA of Cesa2 |
| 7 | cDNA of transcript 6 derived from genomic DNA of Cesa2 |
| 8 | cDNA of transcript 7 derived from genomic DNA of Cesa2 |
| 9 | cDNA of transcript 8 derived from genomic DNA of Cesa2 |
| 10 | cDNA of transcript 9 derived from genomic DNA of Cesa2 |
| 11 | Cesa2 protein encoded by transcript 1 |
| 12 | Cesa2 protein encoded by transcript 2 |
| 13 | Cesa2 protein encoded by transcript 3 |
| 14 | Cesa2 protein encoded by transcript 4 |
| 15 | Cesa2 protein encoded by transcript 5 |
| 16 | Cesa2 protein encoded by transcript 6 |
| 17 | Cesa2 protein encoded by transcript 7 |
| 18 | Cesa2 protein encoded by transcript 8 |
| 19 | Cesa2 protein encoded by transcript 9 |
| 20 | genomic DNA of CDPK3 |
| 21 | cDNA of CDPK3 |
| 22 | CDPK3 protein |
| 23 | genomic DNA of Rpp13 |
| 24 | cDNA of transcript 1 derived from genomic DNA of Rpp13 |
| 25 | cDNA of transcript 2 derived from genomic DNA of Rpp13 |
| 26 | cDNA of transcript 3 derived from genomic DNA of Rpp13 |
| 27 | cDNA of transcript 4 derived from genomic DNA of Rpp13 |
| 28 | cDNA of transcript 5 derived from genomic DNA of Rpp13 |
| 29 | cDNA of transcript 6 derived from genomic DNA of Rpp13 |
| 30 | cDNA of transcript 10 derived from genomic DNA of Rpp13 |
| 31 | cDNA of transcript 11 derived from genomic DNA of Rpp13 |
| 32 | cDNA of transcript 12 derived from genomic DNA of Rpp13 |
| 33 | cDNA of transcript 13 derived from genomic DNA of Rpp13 |
| 34 | Rpp13 protein encoded by transcript 1 |
| 35 | Rpp13 protein encoded by transcript 2 |
| 36 | Rpp13 protein encoded by transcript 3 |
| 37 | Rpp13 protein encoded by transcript 4 |
| 38 | Rpp13 protein encoded by transcript 5 |
| 39 | Rpp13 protein encoded by transcript 6 |
| 40 | Rpp13 protein encoded by transcript 10 |
| 41 | Rpp13 protein encoded by transcript 11 |
| 42 | Rpp13 protein encoded by transcript 12 |
| 43 | Rpp13 protein encoded by transcript 13 |
| 44 | genomic DNA of GSO1 |
| 45 | cDNA of GSO1 |
| 46 | GSO1 protein |
| 47 | Genomic DNA of LRX4 |
| 48 | cDNA of LRX4 |
| 49 | LRX4 protein |
| 50 | reference rcg1 sequence as disclosed in SEQ ID NO: 1 of U.S. Pat. No. 8,062,847 B2 |
| 51 | marker PZE-104115065 |
| 52 | marker Mc0241 (forward primer) |
| 53 | marker Mc0241 (reverse primer) |
| 54 | marker Bnl3.03 (forward primer) |
| 55 | marker Bnl3.03 (reverse primer) |
| 56 | marker Affx-90199961 |
| 57 | marker Affx-90852574 (=PZE-106073551) |
| 58 | primer_alleleX for marker for detecting SNP at position 413 referred to rcg1 as |
| | disclosed in U.S. Pat. No. 8,062,847 B2 |
| 59 | primer_alleleY for marker for detecting SNP at position 413 referred to rcg1 as |
| | disclosed in U.S. Pat. No. 8,062,847 B2 |
| 60 | primer common for marker for detecting SNP at position 413 referred to rcg1 as |
| | disclosed in U.S. Pat. No. 8,062,847 B2 |
| 61 | primer_alleleX for marker for detecting SNP at position 1099 referred to rcg1 as |
| | disclosed in U.S. Pat. No. 8,062,847 B2 |
| 62 | primer_alleleY for marker for detecting SNP at position 1099 referred to rcg1 as |
| | disclosed in U.S. Pat. No. 8,062,847 B2 |
| 63 | primer common for marker for detecting SNP at position 1099 referred to rcg1 as |
| | disclosed in U.S. Pat. No. 8,062,847 B2 |
| 64 | primer_alleleX for marker for detecting SNP at position 1250 referred to rcg1 as |
| | disclosed in U.S. Pat. No. 8,062,847 B2 |
| 65 | primer_alleleY for marker for detecting SNP at position 1250 referred to rcg1 as |
| | disclosed in U.S. Pat. No. 8,062,847 B2 |
| 66 | primer common for marker for detecting SNP at position 1250 referred to rcg1 as |
| | disclosed in U.S. Pat. No. 8,062,847 B2 |
| 67 | primer_alleleX for marker for detecting SNP at position 1607 referred to rcg1 as |
| | disclosed in U.S. Pat. No. 8,062,847 B2 |
| 68 | primer_alleleY for marker for detecting SNP at position 1607 referred to rcg1 as |
| | disclosed in U.S. Pat. No. 8,062,847 B2 |
| 69 | primer common for marker for detecting SNP at position 1607 referred to rcg1 as |
| | disclosed in U.S. Pat. No. 8,062,847 B2 |
| 70 | primer_alleleX for marker for detecting SNP at position 2001 referred to rcg1 as |
| | disclosed in U.S. Pat. No. 8,062,847 B2 |
| 71 | primer_alleleY for marker for detecting SNP at position 2001 referred to rcg1 as |
| | disclosed in U.S. Pat. No. 8,062,847 B2 |
| 72 | primer common for marker for detecting SNP at position 2001 referred to rcg1 as |
| | disclosed in U.S. Pat. No. 8,062,847 B2 |
| 73 | primer_alleleX for marker for detecting SNP at position 2598 referred to rcg1 as |
| | disclosed in U.S. Pat. No. 8,062,847 B2 |
| 74 | primer_alleleY for marker for detecting SNP at position 2598 referred to rcg1 as |
| | disclosed in U.S. Pat. No. 8,062,847 B2 |
| 75 | primer common for marker for detecting SNP at position 2598 referred to rcg1 as |
| | disclosed in U.S. Pat. No. 8,062,847 B2 |
| 76 | primer_alleleX for marker for detecting SNP at position 3342 referred to rcg1 as |
| | disclosed in U.S. Pat. No. 8,062,847 B2 |
| 77 | primer_alleleY for marker for detecting SNP at position 3342 referred to rcg1 as |
| | disclosed in U.S. Pat. No. 8,062,847 B2 |
| 78 | primer common for marker for detecting SNP at position 3342 referred to rcg1 as |
| | disclosed in U.S. Pat. No. 8,062,847 B2 |
| 79 | primer_alleleX for marker for detecting SNP C12305-001-K1 |
| 80 | primer_alleleY for marker for detecting SNP C12305-001-K1 |
| 81 | primer common for marker for detecting SNP C12305-001-K1 |
| 82 | primer_alleleX for marker for detecting SNP C12307-001-K1 |
| 83 | primer_alleleY for marker for detecting SNP C12307-001-K1 |
| 84 | primer common for marker for detecting SNP C12307-001-K1 |
| 85 | primer_alleleX for marker for detecting SNP C16759-001-K1 |
| 86 | primer_alleleY for marker for detecting SNP C16759-001-K1 |
| 87 | primer common for marker for detecting SNP C16759-001-K1 |
| 88 | primer_alleleX for marker for detecting SNP C16760-001-K1 |
| 89 | primer_alleleY for marker for detecting SNP C16760-001-K1 |
| 90 | primer common for marker for detecting SNP C16760-001-K1 |
| 91 | primer_alleleX for marker for detecting SNP C12314-001-K1 |
| 92 | primer_alleleY for marker for detecting SNP C12314-001-K1 |
| 93 | primer common for marker for detecting SNP C12314-001-K1 |
| 94 | amplicon 2 according to FIG. 2 |
| 95 | Forward primer of primer pair 1 for generating amplicon 2 |
| 96 | Reverse primer of primer pair 1 for generating amplicon 2 |
| 97 | Forward primer of primer pair 2 for generating amplicon 2 |
| 98 | Reverse primer of primer pair 2 for generating amplicon 2 |
| 99 | Forward primer of primer pair 3 for generating amplicon 2 |
| 100 | Reverse primer of primer pair 3 for generating amplicon 2 |
| 101 | amplicon 3 according to FIG. 2 |
| 102 | Forward primer of primer pair 1 for generating amplicon 3 |
| 103 | Reverse primer of primer pair 1 for generating amplicon 3 |
| 104 | Forward primer of primer pair 3 for generating amplicon 3 |
| 105 | Reverse primer of primer pair 3 for generating amplicon 3 |
| 106 | amplicon 4 according to FIG. 2 |
| 107 | Forward primer of primer pair 3 for generating amplicon 4 |
| 108 | Reverse primer of primer pair 3 for generating amplicon 4 |
| 109 | amplicon 5 according to FIG. 2 |
| 110 | Forward primer of primer pair 1 for generating amplicon 5 |
| 111 | Reverse primer of primer pair 1 for generating amplicon 5 |
| 112 | Forward primer of primer pair 2 for generating amplicon 5 |
| 113 | Reverse primer of primer pair 2 for generating amplicon 5 |
| 114 | amplicon 6 according to FIG. 2 |
| 115 | Forward primer of primer pair 1 for generating amplicon 6 |
| 116 | Reverse primer of primer pair 1 for generating amplicon 6 |
| 117 | Forward primer of primer pair 3 for generating amplicon 6 |
| 118 | Reverse primer of primer pair 3 for generating amplicon 6 |
| 119 | amplicon 7 according to FIG. 2 |
| 120 | Forward primer of primer pair 1 for generating amplicon 7 |
| 121 | Reverse primer of primer pair 1 for generating amplicon 7 |
| 122 | Forward primer of primer pair 2 for generating amplicon 7 |
| 123 | Reverse primer of primer pair 2 for generating amplicon 7 |
| 124 | Forward primer of primer pair 3 for generating amplicon 7 |
| 125 | Reverse primer of primer pair 3 for generating amplicon 7 |
| 126 | PZE-106066955 |
| 127 | PZE.106072681 |
| 128 | PZE.106073001 |
| 129 | PUT.163a.18167596.1294 |
| 130 | ZmSYNBREED_54943_173 |
| 131 | ZmSYNBREED_54946_787 |
| 132 | PZE.106073260 |
| 133 | ZmSYNBREED_54949_671 |
| 134 | ZmSYNBREED_54956_986 |
| 135 | ZmSYNBREED_54966_239 |
| 136 | PZE.106073623 |
| 137 | ZmSYNBREED_54969_202 |
| 138 | ZmSYNBREED_54969_513 |
| 139 | ZmSYNBREED_54973_806 |
| 140 | ZmSYNBREED_54975_531 |
| 141 | ZmSYNBREED_54977_728 |
| 142 | ZmSYNBREED_54978_371 |
| 143 | PZE.106074105 |
| 144 | ZmSYNBREED_54980_496 |
| 145 | ZmSYNBREED_54981_535 |
| 146 | PZE.106074333 |
| 147 | ZmSYNBREED_54987_542 |
| 148 | PZE.106074560 |
| 149 | genomic DNA of Zm00001d037635 |
| 150 | cDNA of Zm00001d037635 |
| 151 | protein encoded by Zm00001d037635 |
| 152 | genomic DNA of Zm00001d037637 |
| 153 | cDNA of Zm00001d037637 |
| 154 | protein encoded by Zm00001d037637 |
| 155 | genomic DNA of Zm00001d037640 |
| 156 | cDNA of Zm00001d037640 |
| 157 | protein encoded by Zm00001d037640 |
| 158 | genomic DNA of Zm00001d037642 |
| 159 | cDNA of Zm00001d037642 |
| 160 | protein encoded by Zm00001d037642 |
| 161 | genomic DNA of Zm00001d037643 |
| 162 | cDNA of Zm00001d037643 |
| 163 | protein encoded by Zm00001d037643 |
| 164 | genomic DNA of Zm00001d037647 |
| 165 | cDNA of Zm00001d037647 |
| 166 | protein encoded by Zm00001d037647 |
| 167 | genomic DNA of Zm00001d037650 |
| 168 | cDNA of Zm00001d037650 |
| 169 | protein encoded by Zm00001d037650 |
| 170 | genomic DNA of Zm00001d037651 |
| 171 | cDNA of Zm00001d037651 |
| 172 | protein encoded by Zm00001d037651 |
| 173 | genomic DNA of Zm00001d037652 |
| 174 | cDNA of Zm00001d037652 |
| 175 | protein encoded by Zm00001d037652 |
| 176 | genomic DNA of Zm00001d037653 |
| 177 | cDNA of Zm00001d037653 |
| 178 | protein encoded by Zm00001d037653 |
| 179 | genomic DNA of Zm00001d037656 |
| 180 | cDNA of Zm00001d037656 |
| 181 | protein encoded by Zm00001d037656 |
| 182 | genomic DNA of Zm00001d037658 |
| 183 | cDNA of Zm00001d037658 |
| 184 | protein encoded by Zm00001d037658 |
| 185 | genomic DNA of Zm00001d037659 |
| 186 | cDNA of Zm00001d037659 |
| 187 | protein encoded by Zm00001d037659 |
| 188 | genomic DNA of Zm00001d037661 |
| 189 | cDNA of Zm00001d037661 |
| 190 | protein encoded by Zm00001d037661 |
| 191 | genomic DNA of Zm00001d037663 |
| 192 | cDNA of Zm00001d037663 |
| 193 | protein encoded by Zm00001d037663 |
| 194 | genomic DNA of Zm00001d037668 |
| 195 | cDNA of Zm00001d037668 |
| 196 | protein encoded by Zm00001d037668 |
| 197 | genomic DNA of Zm00001d037672 |
| 198 | cDNA of Zm00001d037672 |
| 199 | protein encoded by Zm00001d037672 |
| 200 | genomic DNA of Zm00001d037674 |
| 201 | cDNA of Zm00001d037674 |
| 202 | protein encoded by Zm00001d037674 |
| 203 | genomic DNA of Zm00001d037675 |
| 204 | cDNA of Zm00001d037675 |
| 205 | protein encoded by Zm00001d037675 |
| 206 | genomic DNA of AGP9L |
| 207 | cDNA of AGP9L |
| 208 | protein encoded by AGP9L |
| 209 | genomic DNA of Zm00001d037635 - NC262A genotype |
| 210 | cDNA of Zm00001d037635 - NC262A genotype |
| 211 | protein encoded by Zm00001d037635 - NC262A genotype |
| 212 | genomic DNA of Cesa2 - NC262A genotype |
| 213 | cDNA of Cesa2 - NC262A genotype |
| 214 | protein encoded by Cesa2 - NC262A genotype |
| 215 | genomic DNA of Zm00001d037637 - NC262A genotype |
| 216 | cDNA of Zm00001d037637 - NC262A genotype |
| 217 | protein encoded by Zm00001d037637 - NC262A genotype |
| 218 | genomic DNA of Zm00001d037640 - NC262A genotype |
| 219 | cDNA of Zm00001d037640 - NC262A genotype |
| 220 | protein encoded by Zm00001d037640 - NC262A genotype |
| 221 | genomic DNA of Zm00001d037643 - NC262A genotype |
| 222 | cDNA of Zm00001d037643 - NC262A genotype |
| 223 | protein encoded by Zm00001d037643 - NC262A genotype |
| 224 | genomic DNA of Zm00001d037647 - NC262A genotype |
| 225 | cDNA of Zm00001d037647 - NC262A genotype |
| 226 | protein encoded by Zm00001d037647 - NC262A genotype |
| 227 | genomic DNA of Rpp13 - NC262A genotype |
| 228 | cDNA of Rpp13 - NC262A genotype |
| 229 | protein encoded by Rpp13 - NC262A genotype |
| 230 | genomic DNA of Zm00001d037650 - NC262A genotype |
| 231 | cDNA of Zm00001d037650 - NC262A genotype |
| 232 | protein encoded by Zm00001d037650 - NC262A genotype |
| 233 | genomic DNA of Zm00001d037651 - NC262A genotype |
| 234 | cDNA of Zm00001d037651 - NC262A genotype |
| 235 | protein encoded by Zm00001d037651 - NC262A genotype |
| 236 | genomic DNA of Zm00001d037653 - NC262A genotype |
| 237 | cDNA of Zm00001d037653 - NC262A genotype |
| 238 | protein encoded by Zm00001d037653 - NC262A genotype |
| 239 | genomic DNA of Zm00001d037658 - NC262A genotype |
| 240 | cDNA of Zm00001d037658 - NC262A genotype |
| 241 | protein encoded by Zm00001d037658 - NC262A genotype |
| 242 | genomic DNA of Zm00001d037659 - NC262A genotype |
| 243 | cDNA of Zm00001d037659 - NC262A genotype |
| 244 | protein encoded by Zm00001d037659 - NC262A genotype |
| 245 | genomic DNA of Zm00001d037663 - NC262A genotype |
| 246 | cDNA of Zm00001d037663 - NC262A genotype |
| 247 | protein encoded by Zm00001d037663 - NC262A genotype |
| 248 | genomic DNA of GSO1 - NC262A genotype |
| 249 | cDNA of GSO1 - NC262A genotype |
| 250 | GSO1 protein - NC262A genotype |
| 251 | genomic DNA of Zm00001d037668 - NC262A genotype |
| 252 | cDNA of Zm00001d037668 - NC262A genotype |
| 253 | protein encoded by Zm00001d037668 - NC262A genotype |
| 254 | genomic DNA of Zm00001d037672 - NC262A genotype |
| 255 | cDNA of Zm00001d037672 - NC262A genotype |
| 256 | protein encoded by Zm00001d037672 - NC262A genotype |
| 257 | genomic DNA of Zm00001d037674 - NC262A genotype |
| 258 | cDNA of Zm00001d037674 - NC262A genotype |
| 259 | protein encoded by Zm00001d037674 - NC262A genotype |
| 260 | genomic DNA of Zm00001d037675 - NC262A genotype |
| 261 | cDNA of Zm00001d037675 - NC262A genotype |
| 262 | protein encoded by Zm00001d037675 - NC262A genotype |
| 263 | genomic DNA of LRX4 - NC262A genotype |
| 264 | cDNA of LRX4 - NC262A genotype |
| 265 | LRX4 protein - NC262A genotype |
| 266 | genomic DNA of Zm00001e031194 NC262A genotype |
| | ZmNC262Av2c_OGOO1508HC.1_genomic sequence |
| 267 | cDNA encoded by ZmNC262Av2c_OGOO1508HC.1 |
| 268 | protein encoded by ZmNC262Av2c_OGOO1508HC.1_pro |
| 269 | genomic DNA of Zm00001e031197 NC262A genotype |
| | ZmNC262Av2c_OGOO1512HC.1 genomic sequence |
| 270 | cDNA encoded by ZmNC262Av2c_OGOO1512HC.1 |
| 271 | protein encoded by ZmNC262Av2c_OGOO1512HC.1 |
| 272 | Genomic sequence of contig 81 NC262A genotype NC262A.contig81: 29672100- |
| | 29819600 |

### SUMMARY

[0013] In one aspect is provided a process of identifying a maize plant that displays enhanced resistance to anthracnose stalk rot, the process comprising detecting in the maize plant
[0014] a. the presence of at least two markers at a resistance locus on chromosome 6 comprising a “G” at C16759-001-K1 and one of the following single nucleotide polymorphisms:
   [0015] a “C” at C12305-001-K1,
   [0016] a “C” at C12307-001-K1,
   [0017] a “G” at C16760-001-K1,
   [0018] an “A” at C12314-001-K1; and/or
[0019] b. the presence of at least one marker at a resistance locus on chromosome 6 comprising at least one of the variant nucleotide polymorphisms recited in Table 13; and/or
[0020] c. the presence of at least one marker at a resistance locus on chromosome 4, wherein the resistance locus comprises a Rcg1 resistance allele having a haplotype comprising one or more single nucleotide polymorphism selected from the group consisting of:
   [0021] a “C” at position 413 referenced to SEQ ID NO: 50,
   [0022] a “C” at position 958 referenced to SEQ ID NO: 50,
   [0023] a “C” at position 971 referenced to SEQ ID NO: 50,
   [0024] a “T” at position 1099 referenced to SEQ ID NO: 50,
   [0025] an “A” at position 1154 referenced to SEQ ID NO: 50,
   [0026] a “T” at position 1250 referenced to SEQ ID NO: 50,
   [0027] a “G” at position 1607 referenced to SEQ ID NO: 50,
   [0028] a “G” at position 2001 referenced to SEQ ID NO: 50,
   [0029] an “A” at position 2598 referenced to SEQ ID NO: 50, and
   [0030] an “A” at position 3342 referenced to SEQ ID NO: 50,
      where the at least two markers of (a) or the at least one marker of (b) are/is closely linked to and associated with the resistance locus on chromosome 6 and the at least one marker of (c) is closely linked to and associated with the resistance locus on chromosome 4. Preferably, Rcg1 resistance allele is distinct at each position from the Rcg1 allele derived from accession Mp305 (see U.S. Pat. No. 8,062,847).

[0031] In some embodiments, the resistance locus on chromosome 6 is located on a chromosomal interval between makers PZE-106066805 and PZE-106075546. In some embodiments, the resistance locus on chromosome 4 is located on a chromosomal interval between makers PZE-104102206 and PZE-104132759. In other embodiments, the resistance locus on chromosome 6 is located on a chromosomal interval between 139646631 and 139889078 numbered according to the B73AGPv05 genome sequence. In some embodiments the resistance locus of chromosome 6 comprises SEQ ID NO: 272, or a fragment thereof.

[0032] In some embodiments, the resistance locus on chromosome 6 comprises one or more nucleotide sequences selected from the group consisting of
[0033] i. a nucleotide sequence of SEQ ID NO: 266 or 269,
[0034] ii. a nucleotide sequence having the coding sequence of SEQ ID NO: 267 or 270,
[0035] iii. a nucleotide sequence which is complementary to a nucleotide sequence from i. or ii.,
[0036] iv. a nucleotide sequence with at least 80% or 85%, preferably at least 90%, 91%, 92%, 93%, 94% or 95%, more preferably at least 96%, 97%, 98% or 99% identity to a nucleotide sequence from i., ii. or iii.,
[0037] v. a nucleotide sequence which differs from a nucleic acid sequence according to i., ii. or iii. depending on the degeneracy of the genetic code,
[0038] vi. a nucleotide sequence which hybridizes with a nucleic acid sequence according to i., ii. or iii. under stringent conditions,
[0039] vii. a nucleotide sequence which encodes for a protein comprising the sequence of SEQ ID NO: 268 or 271, or
[0040] viii. a nucleotide sequence which encodes for a protein comprising a sequence with at least 80% or 85%, preferably at least 90%, 91%, 92%, 93%, 94% or 95%, more preferably at least 96%, 97%, 98% or 99% identity to the sequence of SEQ ID NO: 268 or 271.

[0041] In some embodiments, the resistance locus on chromosome 4 does not produce the amplicon according to SEQ ID NO: 119 upon polymerase chain reaction amplification using primers of SEQ ID NOS: 120 and 121, or primers of SEQ ID NOS: 122 and 123, or primers of SEQ ID NOS: 124 and 125.

[0042] In some embodiments, the resistance locus on chromosome 4 does not produce an amplicon selected from the group consisting of SEQ ID NOs: 94, 101, 106, 109, and 114 upon polymerase chain reaction amplification using primers of SEQ ID NOs: 95 and 96, primers of SEQ ID NOs: 97 and 98, primers of SEQ ID NOs: 99 and 100, primers of SEQ ID NOs: 101 and 102, primers of SEQ ID NOs: 103 and 104, primers of SEQ ID NOs: 105 and 106, primers of SEQ ID NOs: 107 and 108, primers of SEQ ID NOs: 109 and 110, primers of SEQ ID NOs: 111 and 112, primers of SEQ ID NOs: 113 and 114, primers of SEQ ID NOs: 115 and 116, or primers of SEQ ID NOs: 117 and 118.

[0043] In some embodiments, the resistance locus on chromosome 6 is derived from NC262A. In some embodiments, the resistance locus on chromosome 4 is derived from NC262A or NC342.

[0044] In some embodiments, the process comprises detecting in the maize plant the presence or absence of at least one allele at the resistance locus on chromosome 6 as defined above under b. In a specific embodiment, the at least one marker at the resistance locus on chromosome 6 detects a “G” at C16759-001-K1.

[0045] In some embodiments, the process comprises detecting in the maize plant both (A) the presence or absence of at least one allele at the resistance locus on chromosome 6 as defined above under b. and (B) the presence or absence of at least one marker at the resistance locus on chromosome 4 as defined above under c. In a specific embodiment, the at least one marker at the resistance locus on chromosome 6 detects a “G” at C16759-001-K1. In a specific embodiment, the at least one marker at the resistance locus on chromosome 4 detects the single nucleotide polymorphisms of the “C” at position 413 in SEQ ID NO: 50, the “C” at position 958 in SEQ ID NO: 50, the “C” at position 971 in SEQ ID NO: 50, the “T” at position 1099 in SEQ ID NO: 50, the “A” at position 1154 in SEQ ID NO: 50, the “T” at position 1250 in SEQ ID NO: 50, the “G” at position 1607 in SEQ ID NO: 50, the “G” at position 2001 in SEQ ID NO: 50, the “A” at position 2598 in SEQ ID NO: 50, or the “A” at position 3342 in SEQ ID NO: 50. In a specific embodiment, the at least one marker at the resistance locus on chromosome 4 detects the single nucleotide polymorphisms of the “C” at position 413 in SEQ ID NO: 50.

[0046] In various embodiments, the presence or absence of at least one nucleotide polymorphism is detected by polymerase chain reaction amplification of a nucleic acid present in the maize plant with a primer configured to specifically amplify a nucleic acid sequence comprising one or more of the nucleotide polymorphisms. In a specific embodiment, the single nucleotide polymorphism is a “C” at position 413 in SEQ ID NO: 50, and the primer comprises the sequence GTACCATGTGACCA (SEQ ID NO: 406). In a specific embodiment, the single nucleotide polymorphism is a “T” at position 1099 in SEQ ID NO: 50, and the primer comprises the sequence GTAGTGTTTTGAC (SEQ ID NO: 407). In a specific embodiment, the single nucleotide polymorphism is a “T” at position 1250 in SEQ ID NO: 50, and the primer comprises the sequence TGATCTCAAAGAT (SEQ ID NO: 408). In a specific embodiment, the single nucleotide polymorphism is a “G” at position 1607 in SEQ ID NO: 50, and the primer comprises the sequence GTTATGTGCACAA (SEQ ID NO: 409). In a specific embodiment, the single nucleotide polymorphism is a “G” at position 2001 in SEQ ID NO: 50, and the primer comprises the sequence AGATGAAGGCTGT (SEQ ID NO: 410). In a specific embodiment, the single nucleotide polymorphism is a “A” at position 2598 in SEQ ID NO: 50, and the primer comprises the sequence AAGTGACATGCAG (SEQ ID NO: 411). In a specific embodiment, the single nucleotide polymorphism is a “A” at position 3342 in SEQ ID NO: 50, and the primer comprises the sequence CATCTGATGAAAGC (SEQ ID NO: 412). In some embodiments, the nucleotide polymorphisms are selected from the group consisting of the variant nucleotides of Table 13.

[0047] In various embodiments, the presence or absence of the allele comprising a “G” at C16759-001-K1 is detected by polymerase chain reaction amplification of a nucleic acid present in the maize plant with a primer configured to specifically amplify a nucleic acid sequence of the allele.

[0048] In a specific embodiment, the primer comprises the sequence AATTATGCTGATGA (SEQ ID NO: 413).

[0049] In another aspect is provided a process for selecting a maize plant with anthracnose stalk rot resistance, the process comprising identifying the maize plant according to any of the above processes, and selecting the maize plant as having anthracnose stalk rot resistance if the presence or absence of the at least one marker at the resistance locus on chromosome 6 and/or the at least one marker at the resistance locus on chromosome 4 is detected. In some embodiments, the process further comprises selecting the maize plant that comprises at least one additional marker allele that is closely linked to and associated with the nucleotide polymorphism(s). In a specific embodiment, the additional marker allele is linked to the single nucleotide polymorphism by no more than 2 cM on a single meiosis based genetic map. In various embodiments, the process further comprises selecting the maize plant that comprises at least one additional marker allele that is linked to and associated with the allele comprising a “G” at C16759-001-K1. In a specific embodiment, the additional marker allele is linked to the allele comprising a “G” at C16759-001-K1 by no more than 2 cM on a single meiosis based genetic map. In some embodiments, the additional marker allele is linked to an allele comprising at least one of the variant nucleotide polymorphisms recited in Table 13.

[0050] In various embodiments of any of the above processes, the process further comprises backcrossing the identified maize plant with another maize plant, preferably comprising backcrossing the resistance locus on chromosome 6 into a genotype which is not NC262A and/or the resistance locus on chromosome 4 into a genotype which is not NC262A or NC342.

[0051] In another aspect is provided is a method of introgressing an allele associated with anthracnose stalk rot resistance into a maize plant, the method comprising:
[0052] a. screening a population with a nucleic acid assay for the detection of at least one marker at a resistance locus on chromosome 6 comprising
   [0053] (i) the following single nucleotide polymorphisms:
      [0054] a “C” at C12305-001-K1,
      [0055] a “C” at C12307-001-K1,
      [0056] a “G” at C16759-001-K1,
      [0057] a “G” at C16760-001-K1,
      [0058] an “A” at C12314-001-K1; and/or
   [0059] (ii) one or more of the variant nucleotide polymorphisms recited in Table 13; and
[0060] b. selecting from the population at least one maize plant comprising the resistance locus on chromosome 6 or comprising a “G” at C16759-001-K1 and/or one or more of the variant nucleotide polymorphisms recited in Table 13; and
[0061] c. crossing the at least one maize plant to a second maize plant;
[0062] d. evaluating progeny plants for the presence of the “G” at C16759-001-K1 and/or one or more of the variant nucleotide polymorphisms recited in Table 13; and
[0063] e. selecting progeny plants possessing the “G” at C16759-001-K1 and/or one or more of the variant nucleotide polymorphisms recited in Table 13.

[0064] In some embodiments, the at least one marker is located within 5 cM of the “G” at C16759-001-K1. In some embodiments, the at least one marker is located within 1 cM of the “G” at C16759-001-K1. In some embodiments, the resistance locus on chromosome 6 is located on a chromosomal interval between makers PZE-106066805 and PZE-106075546. In some embodiments, the resistance locus on chromosome 6 is located on a chromosomal interval between 139646631 and 139889078 numbered according to the B73AGPv05 genome sequence. In some embodiments, the resistance locus of chromosome 6 comprises SEQ ID NO: 272, or a fragment thereof.

[0065] In some embodiments, the resistance locus on chromosome 6 comprising one or more nucleotide sequences selected from the group consisting of
[0066] i. a nucleotide sequence of SEQ ID NO: 266 or 269,
[0067] ii. a nucleotide sequence having the coding sequence of SEQ ID NO: 267 or 270,
[0068] iii. a nucleotide sequence which is complementary to a sequence from i. or ii.,
[0069] iv. a nucleotide sequence which has at least 80% or 85%, preferably at least 90%, 91%, 92%, 93%, 94% or 95%, more preferably at least 96%, 97%, 98% or 99% identity with a sequence from i., ii. or iii.,
[0070] v. a nucleotide sequence which differs from a nucleic acid sequence according to i., ii. or iii. depending on the degeneracy of the genetic code,
[0071] vi. a nucleotide sequence which hybridizes with a nucleic acid sequence according to i., ii. or iii. under stringent conditions,
[0072] vii. a nucleotide sequence which encodes for a protein comprising the sequence of SEQ ID NOs: 268 or 271, or
[0073] viii. a nucleotide sequence which encodes for a protein comprising a sequence with at least 80% or 85%, preferably at least 90%, 91%, 92%, 93%, 94% or 95%, more preferably at least 96%, 97%, 98% or 99% sequence identity to a sequence of SEQ ID NO: 268 or 271.

[0074] In various embodiments, the resistance locus on chromosome 6 is derived from NC262A.

[0075] In another aspect is provided a method of introgressing a locus associated with anthracnose stalk rot resistance into a maize plant, the method comprising:
[0076] a. screening a population with at least one marker to determine if one or more maize plants from the population comprises the locus associated with anthracnose stalk rot resistance, wherein the screening comprises a nucleic acid assay for the detection of at least one marker at a resistance locus on chromosome 4, wherein the resistance locus comprises a Rcg1 resistance allele having a haplotype comprising one or more single nucleotide polymorphism selected from the group consisting of:
   [0077] a “C” at position 413 referenced to SEQ ID NO: 50,
   [0078] a “C” at position 958 referenced to SEQ ID NO: 50,
   [0079] a “C” at position 971 referenced to SEQ ID NO: 50,
   [0080] a “T” at position 1099 referenced to SEQ ID NO: 50,
   [0081] an “A” at position 1154 referenced to SEQ ID NO: 50,
   [0082] a “T” at position 1250 referenced to SEQ ID NO: 50,
   [0083] a “G” at position 1607 referenced to SEQ ID NO: 50,
   [0084] a “G” at position 2001 referenced to SEQ ID NO: 50,
   [0085] an “A” at position 2598 referenced to SEQ ID NO: 50, and
   [0086] an “A” at position 3342 referenced to SEQ ID NO: 50; and
[0087] b. selecting from the population at least one maize plant comprising said locus associated with anthracnose stalk rot resistance; and
[0088] c. crossing the at least one maize plant to a second maize plant;
[0089] d. evaluating progeny plants for the at least one marker associated with anthracnose stalk rot resistance; and
[0090] e. selecting progeny plants possessing the allele associated with anthracnose stalk rot resistance.

[0091] In various embodiments, the at least one marker is located within 5 cM of any one of: “C” at position 413 referenced to SEQ ID NO: 50, a “C” at position 958 referenced to SEQ ID NO: 50, a “C” at position 971 referenced to SEQ ID NO: 50, a “T” at position 1099 referenced to SEQ ID NO: 50, an “A” at position 1154 referenced to SEQ ID NO: 50, a “T” at position 1250 referenced to SEQ ID NO: 50, a “G” at position 1607 referenced to SEQ ID NO: 50, a “G” at position 2001 referenced to SEQ ID NO: 50, an “A” at position 2598 referenced to SEQ ID NO: 50, or an “A” at position 3342 referenced to SEQ ID NO: 50.

[0092] In various embodiments, the at least one marker is located within 1 cM of any one of: “C” at position 413 referenced to SEQ ID NO: 50, a “C” at position 958 referenced to SEQ ID NO: 50, a “C” at position 971 referenced to SEQ ID NO: 50, a “T” at position 1099 referenced to SEQ ID NO: 50, an “A” at position 1154 referenced to SEQ ID NO: 50, a “T” at position 1250 referenced to SEQ ID NO: 50, a “G” at position 1607 referenced to SEQ ID NO: 50, a “G” at position 2001 referenced to SEQ ID NO: 50, an “A” at position 2598 referenced to SEQ ID NO: 50, or an “A” at position 3342 referenced to SEQ ID NO: 50.

[0093] In some embodiments, the resistance locus on chromosome 4 is located on a chromosomal interval between makers PZE-104102206 and PZE-104132759. In some embodiments, the resistance locus on chromosome 4 does not produce an amplicon selected from the group consisting of SEQ ID NOs: 94, 101, 106, 109, and 114 upon polymerase chain reaction amplification by means of primers of SEQ ID NOs: 95 and 96, primers of SEQ ID NOs: 97 and 98, primers of SEQ ID NOs: 99 and 100, primers of SEQ ID NOs: 101 and 102, primers of SEQ ID NOs: 103 and 104, primers of SEQ ID NOs: 105 and 106, primers of SEQ ID NOs: 107 and 108, primers of SEQ ID NOs: 109 and 110, primers of SEQ ID NOs: 111 and 112, primers of SEQ ID NOs: 113 and 114, primers of SEQ ID NOs: 115 and 116, or primers of SEQ ID NOs: 117 and 118.

[0094] In some embodiments, the resistance locus on chromosome 4 is derived from NC262A or NC342.

[0095] In another aspect is provided a method for selecting a maize plant that displays resistance to anthracnose stalk rot, the method comprising:

a. obtaining a first maize plant that comprises within its genome a haplotype comprising one or more of
[0096] i. a “C” at position 413 referenced to SEQ ID NO: 50,
[0097] ii. a “C” at position 958 referenced to SEQ ID NO: 50,
[0098] iii. a “C” at position 971 referenced to SEQ ID NO: 50,
[0099] iv. a “T” at position 1099 referenced to SEQ ID NO: 50,
[0100] v. an “A” at position 1154 referenced to SEQ ID NO: 50,
[0101] vi. a “T” at position 1250 referenced to SEQ ID NO: 50,
[0102] vii. a “G” at position 1607 referenced to SEQ ID NO: 50,
[0103] viii. a “G” at position 2001 referenced to SEQ ID NO: 50,
[0104] ix. an “A” at position 2598 referenced to SEQ ID NO: 50,
[0105] x. an “A” at position 3342 referenced to SEQ ID NO: 50, and
[0106] xi. a “G” at C16759-001-K1; and
   b. crossing the first maize plant to a second maize plant;
   c. evaluating progeny plants for the haplotype in a. or at least one marker allele linked to and associated with the haplotype in b.; and
   d. selecting progeny plants that possess the haplotype in a.

[0107] In some embodiments, the first maize plant is obtained in (a) that comprises within its genome a haplotype comprising a “G” at C16759-001-K1 and one or more of
[0108] i. a “C” at position 413 referenced to SEQ ID NO: 50,
[0109] ii. a “C” at position 958 referenced to SEQ ID NO: 50,
[0110] iii. a “C” at position 971 referenced to SEQ ID NO: 50,
[0111] iv. a “T” at position 1099 referenced to SEQ ID NO: 50,
[0112] v. an “A” at position 1154 referenced to SEQ ID NO: 50,
[0113] vi. a “T” at position 1250 referenced to SEQ ID NO: 50,
[0114] vii. a “G” at position 1607 referenced to SEQ ID NO: 50,
[0115] viii. a “G” at position 2001 referenced to SEQ ID NO: 50,
[0116] ix. an “A” at position 2598 referenced to SEQ ID NO: 50, and
[0117] x. an “A” at position 3342 referenced to SEQ ID NO: 50.

[0118] In another aspect is provided a nucleic acid molecule comprising one or more nucleotide sequences selected from the group consisting of
[0119] i. a nucleotide sequence of SEQ ID NO: 266 or 269,
[0120] ii. a nucleotide sequence having a coding sequence of SEQ ID NO: 267 or 270,
[0121] iii. a nucleotide sequence which is complementary to a sequence from i. or ii.,
[0122] iv. a nucleotide sequence with at least 80% or 85%, preferably at least 90%, 91%, 92%, 93%, 94% or 95%, more preferably at least 96%, 97%, 98% or 99% identity to a sequence from i., ii. or iii.,
[0123] v. a nucleotide sequence which differs from a nucleic acid sequence according to i., ii. or iii. depending on the degeneracy of the genetic code,
[0124] vi. a nucleotide sequence which hybridizes with a nucleic acid sequence according to i., ii. or iii. under stringent conditions,
[0125] vii. a nucleotide sequence which encodes for a protein comprising the sequence of SEQ ID NO: 268 or 271, or
[0126] viii. a nucleotide sequence which encodes for a protein comprising a sequence with at least 80% or 85%, preferably at least 90%, 91%, 92%, 93%, 94% or 95%, more preferably at least 96%, 97%, 98% or 99% identity to the sequence of SEQ ID NO: 268 or 271.

[0127] In another aspect is provided a nucleic acid molecule encoding a Rcg1 resistance allele having a haplotype comprising one or more single nucleotide polymorphisms selected from the group consisting of:
[0128] a “C” at position 413 referenced to SEQ ID NO: 50,
[0129] a “C” at position 958 referenced to SEQ ID NO: 50,
[0130] a “C” at position 971 referenced to SEQ ID NO: 50,
[0131] a “T” at position 1099 referenced to SEQ ID NO: 50,
[0132] an “A” at position 1154 referenced to SEQ ID NO: 50,
[0133] a “T” at position 1250 referenced to SEQ ID NO: 50,
[0134] a “G” at position 1607 referenced to SEQ ID NO: 50,
[0135] a “G” at position 2001 referenced to SEQ ID NO: 50,
[0136] an “A” at position 2598 referenced to SEQ ID NO: 50, and
[0137] an “A” at position 3342 referenced to SEQ ID NO: 50,

[0138] where the nucleic acid molecule is encoding a polypeptide capable of conferring or increasing resistance to a plant disease caused by fungal pathogen in a plant in which the polypeptide is expressed.

[0139] In some embodiments, the nucleic acid molecule does not produce the amplicon according to SEQ ID NO: 119 (Amplicon 7) upon polymerase chain reaction amplification using primers of SEQ ID NOs: 120 and 121, primers of SEQ ID NOs: 122 and 123, or primers of SEQ ID NOs: 124 and 125. In some embodiments, the nucleic acid molecule does not produce an amplicon selected from the group consisting of SEQ ID NOs: 94, 101, 106, 109, and 114 upon polymerase chain reaction amplification by means of primers of SEQ ID NOs: 95 and 96, primers of SEQ ID NOs: 97 and 98, primers of SEQ ID NOs: 99 and 100, primers of SEQ ID NOs: 101 and 102, primers of SEQ ID NOs: 103 and 104, primers of SEQ ID NOs: 105 and 106, primers of SEQ ID NOs: 107 and 108, primers of SEQ ID NOs: 109 and 110, primers of SEQ ID NOs: 111 and 112, primers of SEQ ID NOs: 113 and 114, primers of SEQ ID NOs: 115 and 116, or primers of SEQ ID NOs: 117 and 118.

[0140] In another aspect is provided an expression cassette comprising any of the above nucleic acid molecules, wherein the nucleic acid molecule is operatively linked to heterologous regulatory element, preferably to a heterologous promoter.

[0141] In another aspect is provided a method for conferring or increasing resistance to anthracnose stalk rot in a maize plant, the method comprising the following steps:
[0142] (a) introducing or introgressing into at least one cell of a maize plant any of the above nucleic acid molecules or expression cassettes;
[0143] (b) optionally regenerating or growing a plant from the at least one cell, and
[0144] (c) causing expression of the nucleic acid molecule in the plant.

[0145] In another aspect is provided a method for manufacturing a maize plant having anthracnose stalk rot resistance, comprising:
[0146] (a) introducing or introgressing into at least one cell of a maize plant the above nucleic acid molecules, or the above expression cassette; or
[0147] (b.1) introducing of a site-directed nuclease and a repair matrix into at least one cell of a maize plant, wherein the site-directed nuclease is able to generate at least one double-strand break of the DNA in the genome of the at least one cell and the repair matrix comprises the above nucleic acid molecules or a fragment thereof; or
[0148] (b.2) cultivation of the at least one cell of (b.1) under conditions that allow a homology-directed repair or a homologous recombination, wherein the nucleic acid molecule is integrated from the repair matrix into the genome of the maize plant; and
[0149] (c) obtaining the plant having anthracnose stalk rot resistance from the at least one cell.

[0150] In some embodiments, the site-directed nuclease comprises a zinc-finger nuclease, a transcription activator-like effector nuclease, a CRISPR/Cas system, including a CRISPR/Cas9 system, a CRISPR/Cpf1 system, a CRISPR/MAD7, a CRISPR/CasX system, a CRISPR/CasY system, a Prime Editing system, a CRISPR-based base editor system, an engineered homing endonuclease, and a meganuclease, and/or any combination, variant, or catalytically active fragment thereof.

[0151] Also provided is a maize plant identified according to any of the above processes, or manufactured according to the above method for manufacturing a maize plant having anthracnose stalk rot resistance.

[0152] In another aspect is provided a maize plant comprising a resistance locus associated with anthracnose stalk rot resistance, wherein the maize plant is prepared by any of the above-described processes comprising introgressing the resistance locus into the maize plant.

[0153] In another aspect is provided a maize plant comprising a resistance locus associated with anthracnose stalk rot resistance, wherein the maize plant is prepared by a process comprising introgressing the above nucleic acid molecules into the maize plant.

[0154] In another aspect is provided a maize plant comprising a resistance locus associated with anthracnose stalk rot resistance, wherein the maize plant is prepared by a process comprising introducing a nucleic acid into the maize plant, wherein the nucleic acid comprises
[0155] i. a nucleotide sequence of SEQ ID NO: 266 or 269,
[0156] ii. a nucleotide sequence having coding sequence of SEQ ID NO: 267 or 270,
[0157] iii. a nucleotide sequence which is complementary to a sequence from i. or ii.,
[0158] iv. a nucleotide sequence which has at least 80% or 85%, preferably at least 90%, 91%, 92%, 93%, 94% or 95%, more preferably at least 96%, 97%, 98% or 99% identity with a sequence from i., ii. or iii.,
[0159] v. a nucleotide sequence which differs from a nucleic acid sequence according to i., ii. or iii. depending on the degeneracy of the genetic code,
[0160] vi. a nucleotide sequence which hybridizes with a nucleic acid sequence according to i., ii. or iii. under stringent conditions,
[0161] vii. a nucleotide sequence which encodes for a protein with one of the SEQ ID NO: 268 or 271,
[0162] viii. a nucleotide sequence which encodes for a protein which has at least 80% or 850%, preferably at least 90%, 91%, 92%, 93%, 94% or 95%, more preferably at least 96%, 97%, 98% or 99% identity with a sequence of SEQ ID NO: 213 or 216,
[0163] ix. a nucleotide sequence comprising or consisting of a nucleotide sequence of SEQ ID NO: 272, or a fragment thereof,
[0164] x. a nucleic acid molecule encoding anthracnose stalk rot resistance allele having a haplotype comprising on or more polymorphisms selected recited in Table 13, or
[0165] xi. a nucleic acid molecule encoding a anthracnose stalk rot resistance allele having a haplotype comprising one or more nucleotide polymorphisms selected from the group consisting of:
   [0166] a “C” at position 413 referenced to SEQ ID NO: 50,
   [0167] a “C” at position 958 referenced to SEQ ID NO: 50,
   [0168] a “C” at position 971 referenced to SEQ ID NO: 50,
   [0169] a “T” at position 1099 referenced to SEQ ID NO: 50,
   [0170] an “A” at position 1154 referenced to SEQ ID NO: 50,
   [0171] a “T” at position 1250 referenced to SEQ ID NO: 50,
   [0172] a “G” at position 1607 referenced to SEQ ID NO: 50,
   [0173] a “G” at position 2001 referenced to SEQ ID NO: 50,
   [0174] an “A” at position 2598 referenced to SEQ ID NO: 50, and
   [0175] an “A” at position 3342 referenced to SEQ ID NO: 50.

[0176] In various embodiments, the nucleic acid molecule encodes a polypeptide capable of conferring or increasing resistance to a plant disease caused by fungal pathogen in a plant in which the polypeptide is expressed.

[0177] In another aspect a maize plant is provided, wherein the maize plant is selected according to a method comprising:

a. obtaining a first maize plant that comprises within its genome a haplotype comprising one or more of
i. a “C” at position 413 referenced to SEQ ID NO: 50,
ii. a “C” at position 958 referenced to SEQ ID NO: 50,
iii. a “C” at position 971 referenced to SEQ ID NO: 50,
iv. a “T” at position 1099 referenced to SEQ ID NO: 50,
v. an “A” at position 1154 referenced to SEQ ID NO: 50,
vi. a “T” at position 1250 referenced to SEQ ID NO: 50,
vii. a “G” at position 1607 referenced to SEQ ID NO: 50,
viii. a “G” at position 2001 referenced to SEQ ID NO: 50,
ix. an “A” at position 2598 referenced to SEQ ID NO: 50,
x. an “A” at position 3342 referenced to SEQ ID NO: 50, and

### xi. a “G” at C16759-001-K1; and

[0178] b. crossing the first maize plant to a second maize plant;
c. evaluating progeny plants for the haplotype in a. or at least one marker allele linked to and associated with the haplotype in b.; and
d. selecting progeny plants that possess the haplotype in a.
In some embodiments, the maize plant comprises within its genome a haplotype comprising a “G” at C16759-001-K1 and one or more of
i. a “C” at position 413 referenced to SEQ ID NO: 50,
ii. a “C” at position 958 referenced to SEQ ID NO: 50,
iii. a “C” at position 971 referenced to SEQ ID NO: 50,
iv. a “T” at position 1099 referenced to SEQ ID NO: 50,
v. an “A” at position 1154 referenced to SEQ ID NO: 50,
vi. a “T” at position 1250 referenced to SEQ ID NO: 50,
vii. a “G” at position 1607 referenced to SEQ ID NO: 50,
viii. a “G” at position 2001 referenced to SEQ ID NO: 50,
ix. an “A” at position 2598 referenced to SEQ ID NO: 50, and
x. an “A” at position 3342 referenced to SEQ ID NO: 50.

[0179] Also provided is a seed or plant part of any of the above maize plants.

### DETAILED DESCRIPTION

[0180] From identification of two novel genetic resources of corn on chromosome 4 and 6, provided are materials and molecular genetic selection methods for enhancing resistance to plant fungal pathogens, in particular causative pathogen of anthracnose stalk rot. Resistance loci on chromosome 4 and chromosome 6 are described, such as in the Examples. Both resistance loci on chromosome 4 and chromosome 6 can be used together for breeding a corn plant. Alternatively, only the locus on chromosome 4 can be used for breeding a corn plant. Also, only the locus on chromosome 6 can be used for breeding a corn plant. Thus, the loci can be used together, or as separated loci, i.e., as individual traits. Breeders can use information provided in the Examples and throughout the disclosure to track the resistance loci in the breeding material by standardized marker technology like KASP. The genetic characterization provided in the Examples and throughout the disclosure can allow for the clear distinction of the two loci from other known ASR resistance loci on these chromosomes.

### Definitions

[0181] Unless defined otherwise, technical and scientific terms used herein have the same meaning as commonly understood by one of ordinary skill in the art to which this disclosure belongs.

[0182] As used herein, the term “plant” can be a whole plant, any part thereof, or a cell or tissue culture derived from a plant. Thus, the term “plant” can refer to any of. whole plants, plant components or organs (including but not limited to embryos, pollen, ovules, seeds, leaves, flowers, branches, fruit, kernels, ears, cobs, husks, stalks, roots, root tips, anthers, and the like), plant tissues, plant cells, plant protoplasts, plant cell tissue cultures from which maize plant can be regenerated, plant calli, plant clumps, and plant seeds. A plant cell is a cell of a plant, either taken directly from a seed or plant, or derived through culture from a cell taken from a plant. Grain is intended to mean the mature seed produced by commercial growers for purposes other than growing or reproducing the species. Progeny, variants, and mutants of the regenerated plants are also included within the scope of the embodiments, provided that these parts comprise the introduced polynucleotides.

[0183] The term “locus” generally refers to a genetically defined region of a chromosome carrying a gene or, possibly, two or more genes so closely linked that genetically they behave as a single locus responsible for a phenotype. A “gene” shall refer to a specific genetic coding region within a locus, including its associated regulatory sequences.

[0184] “Germplasm” refers to genetic material of or from an individual (e.g., a plant), a group of individuals (e.g., a plant line, variety or family), or a clone derived from a line, variety, species, or culture. The germplasm can be part of an organism or cell, or can be separate from the organism or cell. In general, germplasm provides genetic material with a specific molecular makeup that provides a physical foundation for some or all of the hereditary qualities of an organism or cell culture. As used herein, germplasm includes cells, seed or tissues from which new plants may be grown, or plant parts, such as leaves, stems, pollen, or cells, that can be cultured into a whole plant.

[0185] The term “allele” refers to one of two or more different nucleotide sequences that occur at a specific locus. A first allele is found on one chromosome, while a second allele occurs at the same position on the homologue of that chromosome, e.g., as occurs for different chromosomes of a heterozygous individual, or between different homozygous or heterozygous individuals in a population. “Allele frequency” refers to the frequency (proportion or percentage) of an allele within a population, or a population of lines. One can estimate the allele frequency within a population by averaging the allele frequencies of a sample of individuals from that population.

[0186] An allele “positively” correlates with a trait when it is linked to it and when presence of the allele is an indicator that the desired trait or trait form will occur in a plant comprising the allele. An allele negatively correlates with a trait when it is linked to it and when presence of the allele is an indicator that a desired trait or trait form will not occur in a plant comprising the allele.

[0187] The terms “amplify” and “amplifying” in the context of nucleic acid amplification refer to any process whereby additional copies of a selected nucleic acid (or a transcribed form thereof) are produced. Typical amplification methods include various polymerase based replication methods, including the polymerase chain reaction (PCR), ligase mediated methods such as the ligase chain reaction (LCR) and RNA polymerase based amplification (e.g., by transcription) methods.

[0188] An “amplicon” is an amplified nucleic acid, e.g., a nucleic acid that is produced by amplifying a template nucleic acid by any available amplification method (e.g., PCR, LCR, transcription, or the like).

[0189] An individual is “homozygous” if the individual has only one type of allele at a given locus (e.g., a diploid individual has a copy of the same allele at a locus for each of two homologous chromosomes). An individual is “heterozygous” if more than one allele type is present at a given locus (e.g., a diploid individual with one copy each of two different alleles). The term “homogeneity” indicates that members of a group have the same genotype at one or more specific loci. In contrast, the term “heterogeneity” is used to indicate that individuals within the group differ in genotype at one or more specific loci.

[0190] The term “molecular marker” can refer to a genetic marker, or an encoded product thereof (e.g., a protein) used as a point of reference when identifying a linked locus. A marker can be derived from genomic nucleotide sequences or from expressed nucleotide sequences (e.g., from a spliced RNA, a cDNA, etc.), or from an encoded polypeptide. The term “molecular marker” can also refer to nucleic acid sequences complementary to or flanking the marker sequences, such as nucleic acids used as probes or primer pairs capable of amplifying the marker sequence. A “molecular marker probe” is a nucleic acid sequence or molecule that can be used to identify the presence of a marker locus, e.g., a nucleic acid probe that is complementary to a marker locus sequence. Alternatively, a marker probe refers to a probe of any type that is able to distinguish (i.e., genotype) the particular allele that is present at a marker locus.

[0191] Nucleic acids are “complementary” when they specifically hybridize in solution, e.g., according to Watson-Crick base pairing rules. Some of the markers described herein are also referred to as hybridization markers when located on an indel region, such as the non-colinear region described herein. This is because the insertion region is, by definition, a polymorphism vis-à-vis a plant without the insertion. Thus, the marker need only indicate whether the indel region is present or absent. Any suitable marker detection technology may be used to identify such a hybridization marker, e.g. SNP technology is used in the examples provided herein.

[0192] As used herein, “linked” or “linkage” (as distinguished from the term “operably linked”) shall refer to the genetic or physical linkage of loci or genes. Loci or genes are considered genetically linked if the recombination frequency between them is less than about 50% as determined on a single meiosis map. They are progressively more linked if the recombination frequency is about 40%, about 30%, about 20%, about 10% or less, as determined on a single meiosis map. Two or more genes are physically linked (or syntenic) if they have been demonstrated to be on a single piece of DNA, such as a chromosome. Genetically linked genes will in practice be physically linked (or syntenic), but the exact physical distance (number of nucleotides) may not have been demonstrated yet.

[0193] As used herein, “introgression” or “introgressing” shall refer to moving a gene or locus from one line to another by: (1) crossing individuals of each line to create a population; and (2) selecting individuals carrying the desired gene or locus. Selection may be done phenotypically or using markers (marker assisted selection). The individuals so selected are again crossed (i.e., backcrossed) with the desired target line; there may be two, three, four, five, six or more, or even ten or more backcrosses. After each cross, the selection process is repeated. For example, the gene of the embodiments, or the locus containing it, may be introgressed into a recurrent parent that is not resistant or only partially resistant, meaning that it is sensitive or susceptible or partially so, to Cg (Colletotrichum graminicola). The recurrent parent line with the introgressed gene or locus then has enhanced or newly conferred resistance to Cg. This line into which the anthracnose stalk rot resistance locus has been introgressed is referred to herein as an anthracnose stalk rot resistance locus conversion.

[0194] The process of introgressing is often referred to as “backcrossing” when the process is repeated two or more times. In introgressing or backcrossing, the “donor” parent refers to the parental plant with the desired gene or locus to be introgressed. The “recipient” parent (used one or more times) or “recurrent” parent (used two or more times) refers to the parental plant into which the gene or locus is being introgressed. For example, see Ragot, M. et al., “Marker-assisted backcrossing: a practical example” in Techniques et Utilisations des Marqueurs Moleculaires Les Colloques, 1995, Vol. 72, pp. 45-56 and Openshaw et al., “Marker-assisted Selection in Backcross Breeding, Analysis of Molecular Marker Data”, 1994, pages 41-43. The initial cross gives rise to the F1 generation; the term “BC1” then refers to the second use of the recurrent parent, “BC2” refers to the third use of the recurrent parent, and so on.

[0195] The terms “pathogen resistance”, “fungal resistance”, and “disease resistance” are intended to mean that the plant avoids the disease symptoms that are the outcome of plant-pathogen interactions. That is, pathogens are prevented from causing plant diseases and the associated disease symptoms, or alternatively, the disease symptoms caused by the pathogen are minimized or lessened, such as, for example, the reduction of stress and associated yield loss. One of skill in the art will appreciate that the compositions and methods disclosed herein can be used with other compositions and methods available in the art for protecting plants from pathogen attack.

[0196] As used herein, “fungal resistance” refers to enhanced resistance or tolerance to a fungal pathogen when compared to that of a wild type plant. Effects may vary from a slight increase in tolerance to the effects of the fungal pathogen (e.g., partial inhibition) to total resistance such that the plant is unaffected by the presence of the fungal pathogen. An increased level of resistance against a particular fungal pathogen or against a wider spectrum of fungal pathogens constitutes “enhanced” or improved fungal resistance. The embodiments of the disclosure also will enhance or improve fungal plant pathogen resistance, such that the resistance of the plant to a fungal pathogen or pathogens will increase. The term “enhance” refers to improve, increase, amplify, multiply, elevate, raise, and the like. Herein, plants of the disclosure are described as being resistant to infection by Cg or having ‘enhanced resistance’ to infection by Cg as a result of the loci at chromosomes 4 and 6 described herein.

[0197] As used herein, the terms “encoding” or “encoded” when used in the context of a specified nucleic acid mean that the nucleic acid comprises the requisite information to direct translation of the nucleotide sequence into a specified protein. The information by which a protein is encoded is specified by the use of codons. A nucleic acid encoding a protein may comprise non-translated sequences (e.g., introns) within translated regions of the nucleic acid or may lack such intervening non-translated sequences (e.g., as in cDNA).

[0198] “Transformation” refers to the transfer of a nucleic acid fragment into the genome of a host organism, resulting in genetically stable inheritance. Host organisms containing the transformed nucleic acid fragments are referred to as “transgenic” organisms. “Host cell” refers the cell into which transformation of the recombinant DNA construct takes place and may include a yeast cell, a bacterial cell, and a plant cell. Examples of methods of plant transformation include Agrobacterium-mediated transformation and particle-bombardment technology.

[0199] “Stable transformation” is intended to mean that the nucleotide construct introduced into a plant integrates into the genome of the plant and is capable of being inherited by the progeny thereof. “Transient transformation” or “transient expression” is intended to mean that a polynucleotide is introduced into the plant and does not integrate into the genome of the plant or a polypeptide is introduced into a plant.

[0200] As used herein, “nucleic acid” includes reference to a deoxyribonucleotide or ribonucleotide polymer in either single- or double-stranded form, and unless otherwise limited, encompasses known analogues (e.g., peptide nucleic acids) having the essential nature of natural nucleotides in that they hybridize to single-stranded nucleic acids in a manner similar to naturally occurring nucleotides.

[0201] The terms “polypeptide,” “peptide,” and “protein” are used interchangeably herein to refer to a polymer of amino acid residues. The terms apply to amino acid polymers in which one or more amino acid residues is an artificial chemical analogue of a corresponding naturally occurring amino acid, as well as to naturally occurring amino acid polymers. Polypeptides can be produced either from a nucleic acid disclosed herein, or by the use of standard molecular biology techniques. For example, a truncated protein can be produced by expression of a recombinant nucleic acid in an appropriate host cell, or alternatively by a combination of ex vivo procedures, such as protease digestion and purification.

[0202] As used herein, “full-length sequence,” in reference to a specified polynucleotide, means having the entire nucleic acid sequence of a native sequence. “Native sequence” is intended to mean an endogenous sequence, i.e., a non-engineered sequence found in an organism's genome.

[0203] A “fragment” is a portion of the nucleotide sequence or a portion of the amino acid sequence and hence protein encoded thereby. Fragments of a nucleotide sequence may encode protein fragments that retain the biological activity of the native protein and hence have the ability to confer fungal resistance upon a plant. Alternatively, fragments of a nucleotide sequence that are useful as hybridization probes do not necessarily encode fragment proteins retaining biological activity. Thus, fragments of a nucleotide sequence may range from at least about 15 nucleotides, about 50 nucleotides, about 100 nucleotides, and up to the full-length nucleotide sequence encoding the polypeptides of the embodiments.

[0204] The term “variant” is intended to mean a substantially similar sequence. For polynucleotides, a variant comprises a deletion and/or addition of one or more nucleotides at one or more internal sites within the native polynucleotide and/or a substitution of one or more nucleotides at one or more sites in the native polynucleotide. As used herein, a “native” polynucleotide or polypeptide comprises a naturally occurring nucleotide sequence or amino acid sequence, respectively. Variants of the nucleic acids of the embodiments can be constructed such that the open reading frame is maintained. For polynucleotides, conservative variants include those sequences that, because of the degeneracy of the genetic code, encode the amino acid sequence of one of the polypeptides of the embodiments. Variant polynucleotides also include synthetically derived polynucleotides, such as those generated, for example, by using site-directed mutagenesis but which still encode a protein of the embodiments. Generally, variants of a particular polynucleotide of the embodiments will have at least about 40%, about 45%, about 50%, about 55%, about 60%, about 65%, about 70%, about 75%, about 80%, about 85%, about 90%, about 91%, about 92%, about 93%, about 94%, about 95%, about 96%, about 97%, about 98%, about 99% or more sequence identity to that particular polynucleotide as determined by sequence alignment programs and parameters described elsewhere herein.

[0205] As used herein, “reference sequence” is a defined sequence used as a basis for sequence comparison. A reference sequence may be a subset or the entirety of a specified sequence; for example, as a segment of a full-length cDNA or gene sequence, or the complete cDNA or gene sequence.

[0206] The term “comparison window” refers to a contiguous and specified segment of a polynucleotide sequence, wherein the polynucleotide sequence in the comparison window may comprise additions or deletions (i.e., gaps) compared to the reference sequence (which does not comprise additions or deletions) for optimal alignment of the two polynucleotides. Generally, the comparison window is at least about 20 contiguous nucleotides in length, and optionally can be about 30, about 40, about 50, about 100, or longer. Those of skill in the art understand that to avoid a high similarity to a reference sequence due to inclusion of gaps in the polynucleotide sequence a gap penalty is typically introduced and is subtracted from the number of matches.

[0207] Methods of alignment of sequences for comparison are well known in the art. Thus, the determination of percent sequence identity between any two sequences can be accomplished using a mathematical algorithm.

[0208] The nucleic acids, polypeptides, and markers of the embodiments find use in methods for conferring or enhancing fungal resistance to a plant. Accordingly, the compositions and methods disclosed herein are useful for identifying plants resistant to fungal pathogens, such as pathogens causing anthracnose stalk rot.

### Variants

[0209] The genes and polynucleotides described herein may be comprised in naturally occurring sequences as well as mutant forms. Likewise, the proteins described herein may encompass both naturally occurring proteins as well as variations and modified forms thereof. Such variants can possess the desired ability to confer or enhance plant fungal pathogen resistance.

[0210] Variant polynucleotides and proteins may also be comprised of sequences and proteins derived from mutagenic or recombinogenic procedures, including and not limited to procedures such as DNA shuffling. One of skill in the art could envision modifications that would alter the range of pathogens to which the protein responds. With such a procedure, one or more different protein coding sequences can be manipulated to create a new protein possessing the desired properties. In this manner, libraries of recombinant polynucleotides are generated from a population of related sequence polynucleotides comprising sequence regions that have substantial sequence identity and can be homologously recombined in vitro or in vivo. For example, sequence motifs encoding a domain of interest may be shuffled between a resistance gene described herein and other known genes to obtain a new gene coding for a protein with an improved property of interest, such as increased ability to confer or enhance plant fungal pathogen resistance. Strategies for such DNA shuffling are known in the art. See, for example, Stemmer, Proc. Natl. Acad. Sci., 1994, USA 91:10747-10751; Stemmer, Nature, 1994, 370:389-391; Crameri et al., Nature Biotech., 1997, 15:436-438; Moore et al., J. Mol. Biol., 1997, 272:336-347; Zhang et al., Proc. Natl. Acad. Sci. USA, 1997, 94:4504-4509; Crameri et al., Nature, 1998, 391:288-291; and U.S. Pat. Nos. 5,605,793 and 5,837,458.

[0211] For example, an entire polynucleotide disclosed herein, or one or more portions thereof, may be used as a probe capable of specifically hybridizing to corresponding polynucleotides and messenger RNAs. To achieve specific hybridization under a variety of conditions, such probes include sequences that are unique and are optimally at least about 10 nucleotides in length, at least about 15 nucleotides in length, or at least about 20 nucleotides in length. Such probes may be used to amplify corresponding polynucleotides from a chosen organism by PCR. This technique may be used to isolate additional coding sequences from a desired organism or as a diagnostic assay to determine the presence of coding sequences in an organism. Hybridization techniques include hybridization screening of plated DNA libraries.

[0212] Hybridization of such sequences may be carried out under stringent conditions. “Stringent conditions” or “stringent hybridization conditions” are conditions under which a probe will hybridize to its target sequence to a detectably greater degree than to other sequences (e.g., at least 2-fold over background). Stringent conditions are sequence-dependent and will be different in different circumstances. By controlling the stringency of the hybridization and/or washing conditions, target sequences that are 100% complementary to the probe can be identified by homologous probing. Alternatively, stringency conditions can be adjusted to allow some mismatching in sequences so that lower degrees of similarity are detected by heterologous probing. Generally, a probe is less than about 1000 nucleotides in length, optimally less than 500 nucleotides in length.

[0213] The proteins described herein may be altered in various ways including amino acid substitutions, deletions, truncations, and insertions. Methods for such manipulations are generally known in the art. For example, amino acid sequence variants and fragments of anti-pathogenic proteins can be prepared by mutations in the DNA. Methods for mutagenesis and polynucleotide alterations are well known in the art. See, for example, Kunkel (1985) Proc. Natl. Acad. Sci. USA 82:488-492; Kunkel et al. (1987) Methods in Enzymol. 154:367-382; U.S. Pat. No. 4,873,192; Walker and Gaastra, eds. (1983) Techniques in Molecular Biology (MacMillan Publishing Company, New York) and the references cited therein. Guidance as to appropriate amino acid substitutions that do not affect biological activity of the protein of interest may be found in the model of Dayhoff et al. (1978) Atlas of Protein Sequence and Structure (Natl. Biomed. Res. Found., Washington, D.C.), herein incorporated by reference. Conservative substitutions, such as exchanging one amino acid with another having similar properties, may be optimal.

### Molecular Markers

[0214] Molecular markers can be used in a variety of plant breeding applications (see Staub et al. Hortscience, 1996, 31: 729-741; and Tanksley, Plant Molecular Biology Reporter, 1993, 1: 3-8). For detecting recombinations, markers need to detect differences, or polymorphisms, within the population being monitored. Differences at the DNA level due to polynucleotide sequence differences (e.g., SSRs, RFLPs, FLPs, SNPs) are detected by molecular markers. The genomic variability can be of any origin, for example, insertions, deletions, duplications, repetitive elements, point mutations, recombination events, or the presence and sequence of transposable elements. Molecular markers can be derived from genomic or expressed nucleic acids (e.g., ESTs). ESTs are generally well conserved within a species, while other regions of DNA (typically non-coding) tend to accumulate polymorphism, and therefore, can be more variable between individuals of the same species. A large number of corn molecular markers are known in the art, and are published or available from various sources, such as the Maize GDB and the Arizona Genomics Institute.

[0215] Marker-assisted selection may be used to increase the efficiency of backcrossing and introgressing genes. A molecular marker that demonstrates linkage with a locus affecting a desired phenotypic trait may provide a useful tool for the selection of the trait in a plant population. This is particularly true where the phenotype is hard to assay, e.g., many disease resistance traits, or, occurs at a late stage in plant development, e.g., kernel characteristics. Since DNA marker assays are less laborious, and take up less physical space, than field phenotyping, much larger populations can be assayed to increase the chances of finding a recombinant with the target segment from the donor line moved to the recipient line. The closer the linkage, the more useful the marker because recombination is less likely to occur between the marker and the gene causing the trait. The reduced rate of recombination can result in fewer false positives. Having flanking markers decreases the chances that false positive selection will occur as a double recombination event would be needed.

[0216] Various types of fragment length polymorphisms or FLP markers can be generated. Most commonly, amplification primers are used to generate fragment length polymorphisms. Such FLP markers are in many ways similar to SSR markers, except that the region amplified by the primers is not typically a highly repetitive region. Still, the amplified region, or amplicon, will have sufficient variability among germplasm, often due to insertions or deletions, such that the fragments generated by the amplification primers can be distinguished among polymorphic individuals, and such indels are known to occur frequently in maize (Bhattramakki et al., Plant Mol Biol 2002, 48, 539-547). The term “indel” refers to an insertion or deletion, wherein one line may be referred to as having an insertion relative to a second line, or the second line may be referred to as having a deletion relative to the first line. The MZA markers disclosed herein are examples of amplified FLP markers that have been selected because they are in close proximity to the Rcg1 and Rcg1b genes.

[0217] SNP markers detect single base pair nucleotide substitutions. Of all the molecular marker types, SNPs are the most abundant, thus having the potential to provide the highest genetic map resolution (Bhattramakki et al., 2002 Plant Molecular Biology 48:539-547). SNPs can be assayed at an even higher level of throughput than SSRs, such as in an ultra-high-throughput fashion. Several methods are available for SNP genotyping, including but not limited to, hybridization, primer extension, oligonucleotide ligation, nuclease cleavage, mini-sequencing and coded spheres.

[0218] A number of SNPs together within a sequence, or across linked sequences, can be used to describe a haplotype for any particular genotype. Haplotypes can be more informative than single SNPs and can be more descriptive of any particular genotype. For example, a single SNP may be allele ‘T’ for MP305, but the allele ‘T’ might also occur in the maize breeding population being utilized for recurrent parents. In this case, a haplotype, e.g. a series of alleles at linked SNP markers, may be more informative. Once a unique haplotype has been assigned to a donor chromosomal region, that haplotype can be used in that population or any subset thereof to determine whether an individual has a particular gene. Using automated high throughput marker detection platforms may make this process highly efficient and effective.

[0219] Various primers described herein can be used as FLP markers to select for the anthracnose stalk rot resistance locus on chromosome 4 or 6 of Zea mays. Exemplary primers include, but are not limited to, those of SEQ ID NOS: 95-118 and 120-125. These primers can also be used to convert these markers to SNP or other structurally similar or functionally equivalent markers (e.g., SSRs, CAPs, and indels), in the same regions. Using PCR, the primers can be used to amplify DNA segments from individuals (preferably inbred) that represent the diversity in the population of interest. The PCR products can be sequenced directly in one or both directions. The resulting sequences may then aligned and polymorphisms identified. The polymorphisms are not limited to single nucleotide polymorphisms (SNPs), but also include indels, CAPS, SSRs, and VNTRs (variable number of tandem repeats). Specifically with respect to the fine map information described herein, one can readily use the information provided herein to obtain additional polymorphic SNPs (and other markers) within the region amplified by the primers listed in this disclosure. Markers within the described map region can be hybridized to BACs or other genomic libraries, or electronically aligned with genome sequences, to find new sequences in the same approximate location as the described markers.

### Nucleic Acids

[0220] In one aspect is provided a nucleic acid comprising the sequence of SEQ ID NO: 209, and a sequence at least 80%, 81%, 82%, 83%, 84%, 85%, 86%, 87%, 88%, 89%, 90%, 91%, 92%, 93%, 94%, 95%, 96%, 97%, 98%, or 99% identical to the nucleotide sequence of SEQ ID NO: 209. In one aspect is provided a nucleic acid comprising the sequence of SEQ ID NO: 212, and a sequence at least 80%, 81%, 82%, 83%, 84%, 85%, 86%, 87%, 88%, 89%, 90%, 91%, 92%, 93%, 94%, 95%, 96%, 97%, 98%, or 99% identical to the nucleotide sequence of SEQ ID NO: 212. In one aspect is provided a nucleic acid comprising the sequence of SEQ ID NO: 215, and a sequence at least 80%, 81%, 82%, 83%, 84%, 85%, 86%, 87%, 88%, 89%, 90%, 91%, 92%, 93%, 94%, 95%, 96%, 97%, 98%, or 99% identical to the nucleotide sequence of SEQ ID NO: 215. In one aspect is provided a nucleic acid comprising the sequence of SEQ ID NO: 218, and a sequence at least 80%, 81%, 82%, 83%, 84%, 85%, 86%, 87%, 88%, 89%, 90%, 91%, 92%, 93%, 94%, 95%, 96%, 97%, 98%, or 99% identical to the nucleotide sequence of SEQ ID NO: 218. In one aspect is provided a nucleic acid comprising the sequence of SEQ ID NO: 221, and a sequence at least 80%, 81%, 82%, 83%, 84%, 85%, 86%, 87%, 88%, 89%, 90%, 91%, 92%, 93%, 94%, 95%, 96%, 97%, 98%, or 99% identical to the nucleotide sequence of SEQ ID NO: 221. In one aspect is provided a nucleic acid comprising the sequence of SEQ ID NO: 224, and a sequence at least 80%, 81%, 82%, 83%, 84%, 85%, 86%, 87%, 88%, 89%, 90%, 91%, 92%, 93%, 94%, 95%, 96%, 97%, 98%, or 99% identical to the nucleotide sequence of SEQ ID NO: 224. In one aspect is provided a nucleic acid comprising the sequence of SEQ ID NO: 227, and a sequence at least 80%, 81%, 82%, 83%, 84%, 85%, 86%, 87%, 88%, 89%, 90%, 91%, 92%, 93%, 94%, 95%, 96%, 97%, 98%, or 99% identical to the nucleotide sequence of SEQ ID NO: 227. In one aspect is provided a nucleic acid comprising the sequence of SEQ ID NO: 230, and a sequence at least 80%, 81%, 82%, 83%, 84%, 85%, 86%, 87%, 88%, 89%, 90%, 91%, 92%, 93%, 94%, 95%, 96%, 97%, 98%, or 99% identical to the nucleotide sequence of SEQ ID NO: 230. In one aspect is provided a nucleic acid comprising the sequence of SEQ ID NO: 233, and a sequence at least 80%, 81%, 82%, 83%, 84%, 85%, 86%, 87%, 88%, 89%, 90%, 91%, 92%, 93%, 94%, 95%, 96%, 97%, 98%, or 99% identical to the nucleotide sequence of SEQ ID NO: 233. In one aspect is provided a nucleic acid comprising the sequence of SEQ ID NO: 236, and a sequence at least 80%, 81%, 82%, 83%, 84%, 85%, 86%, 87%, 88%, 89%, 90%, 91%, 92%, 93%, 94%, 95%, 96%, 97%, 98%, or 99% identical to the nucleotide sequence of SEQ ID NO: 236. In one aspect is provided a nucleic acid comprising the sequence of SEQ ID NO: 239, and a sequence at least 80%, 81%, 82%, 83%, 84%, 85%, 86%, 87%, 88%, 89%, 90%, 91%, 92%, 93%, 94%, 95%, 96%, 97%, 98%, or 99% identical to the nucleotide sequence of SEQ ID NO: 239. In one aspect is provided a nucleic acid comprising the sequence of SEQ ID NO: 242, and a sequence at least 80%, 81%, 82%, 83%, 84%, 85%, 86%, 87%, 88%, 89%, 90%, 91%, 92%, 93%, 94%, 95%, 96%, 97%, 98%, or 99% identical to the nucleotide sequence of SEQ ID NO: 242. In one aspect is provided a nucleic acid comprising the sequence of SEQ ID NO: 245, and a sequence at least 80%, 81%, 82%, 83%, 84%, 85%, 86%, 87%, 88%, 89%, 90%, 91%, 92%, 93%, 94%, 95%, 96%, 97%, 98%, or 99% identical to the nucleotide sequence of SEQ ID NO: 245. In one aspect is provided a nucleic acid comprising the sequence of SEQ ID NO: 248, and a sequence at least 80, 81%, 82%, 83%, 84%, 85%, 86%, 87%, 88%, 89%, 90%, 91%, 92%, 93%, 94%, 95%, 96%, 97%, 98%, or 99% identical to the nucleotide sequence of SEQ ID NO: 248. In one aspect is provided a nucleic acid comprising the sequence of SEQ ID NO: 251, and a sequence at least 80, 81%, 82%, 83%, 84%, 85%, 86%, 87%, 88%, 89%, 90%, 91%, 92%, 93%, 94%, 95%, 96%, 97%, 98%, or 99% identical to the nucleotide sequence of SEQ ID NO: 251. In one aspect is provided a nucleic acid comprising the sequence of SEQ ID NO: 254, and a sequence at least 80, 81%, 82%, 83%, 84%, 85%, 86%, 87%, 88%, 89%, 90%, 91%, 92%, 93%, 94%, 95%, 96%, 97%, 98%, or 99% identical to the nucleotide sequence of SEQ ID NO: 254. In one aspect is provided a nucleic acid comprising the sequence of SEQ ID NO: 257, and a sequence at least 80, 81%, 82%, 83%, 84%, 85%, 86%, 87%, 88%, 89%, 90%, 91%, 92%, 93%, 94%, 95%, 96%, 97%, 98%, or 99% identical to the nucleotide sequence of SEQ ID NO: 257. In one aspect is provided a nucleic acid comprising the sequence of SEQ ID NO: 260, and a sequence at least 80, 81%, 82%, 83%, 84%, 85%, 86%, 87%, 88%, 89%, 90%, 91%, 92%, 93%, 94%, 95%, 96%, 97%, 98%, or 99% identical to the nucleotide sequence of SEQ ID NO: 260. In one aspect is provided a nucleic acid comprising the sequence of SEQ ID NO: 263, and a sequence at least 80, 81%, 82%, 83%, 84%, 85%, 86%, 87%, 88%, 89%, 90%, 91%, 92%, 93%, 94%, 95%, 96%, 97%, 98%, or 99% identical to the nucleotide sequence of SEQ ID NO: 263. In one aspect is provided a nucleic acid comprising the sequence of SEQ ID NO: 266, and a sequence at least 80, 81%, 82%, 83%, 84%, 85%, 86%, 87%, 88%, 89%, 90%, 91%, 92%, 93%, 94%, 95%, 96%, 97%, 98%, or 99% identical to the nucleotide sequence of SEQ ID NO: 266. In one aspect is provided a nucleic acid comprising the sequence of SEQ ID NO: 267, and a sequence at least 80, 81%, 82%, 83%, 84%, 85%, 86%, 87%, 88%, 89%, 90%, 91%, 92%, 93%, 94%, 95%, 96%, 97%, 98%, or 99% identical to the nucleotide sequence of SEQ ID NO: 267. In one aspect is provided a nucleic acid comprising the sequence of SEQ ID NO: 269, and a sequence at least 80, 81%, 82%, 83%, 84%, 85%, 86%, 87%, 88%, 89%, 90%, 91%, 92%, 93%, 94%, 95%, 96%, 97%, 98%, or 99% identical to the nucleotide sequence of SEQ ID NO: 269. In one aspect is provided a nucleic acid comprising the sequence of SEQ ID NO: 270, and a sequence at least 80, 81%, 82%, 83%, 84%, 85%, 86%, 87%, 88%, 89%, 90%, 91%, 92%, 93%, 94%, 95%, 96%, 97%, 98%, or 99% identical to the nucleotide sequence of SEQ ID NO: 270. In one aspect is provided a nucleic acid comprising the sequence of SEQ ID NO: 272, or a fragment thereof, and a sequence at least 80%, 81%, 82%, 83%, 84%, 85%, 86%, 87%, 88%, 89%, 90%, 91%, 92%, 93%, 94%, 95%, 96%, 97%, 98%, or 99% identical to the nucleotide sequence of SEQ ID NO: 272, or a fragment thereof.

[0221] In one aspect is provided a nucleic acid comprising the sequence of SEQ ID NO: 1, and a sequence at least 80%, 81%, 82%, 83%, 84%, 85%, 86%, 87%, 88%, 89%, 90%, 91%, 92%, 93%, 94%, 95%, 96%, 97%, 98%, or 99% identical to the nucleotide sequence of SEQ ID NO: 1. In one aspect is provided a nucleic acid comprising the sequence of SEQ ID NO: 20, and a sequence at least 80%, 81%, 82%, 83%, 84%, 85%, 86%, 87%, 88%, 89%, 90%, 91%, 92%, 93%, 94%, 95%, 96%, 97%, 98%, or 99% identical to the nucleotide sequence of SEQ ID NO: 20. In one aspect is provided a nucleic acid comprising the sequence of SEQ ID NO: 23, and a sequence at least 80%, 81%, 82%, 83%, 84%, 85%, 86%, 87%, 88%, 89%, 90%, 91%, 92%, 93%, 94%, 95%, 96%, 97%, 98%, or 99% identical to the nucleotide sequence of SEQ ID NO: 23. In one aspect is provided a nucleic acid comprising the sequence of SEQ ID NO: 44, and a sequence at least 80%, 81%, 82%, 83%, 84%, 85%, 86%, 87%, 88%, 89%, 90%, 91%, 92%, 93%, 94%, 95%, 96%, 97%, 98%, or 99% identical to the nucleotide sequence of SEQ ID NO: 44. In one aspect is provided a nucleic acid comprising the sequence of SEQ ID NO: 47, and a sequence at least 80%, 81%, 82%, 83%, 84%, 85%, 86%, 87%, 88%, 89%, 90%, 91%, 92%, 93%, 94%, 95%, 96%, 97%, 98%, or 99% identical to the nucleotide sequence of SEQ ID NO: 47. Any of these nucleic acids may comprise additional sequence from a resistance locus on chromosome 6 of Zea mays. Also provided are maize plants comprising the nucleotide sequence. In various embodiments, the maize plant is more resistant to stalk rot than a comparable maize plant that does not comprise the nucleic acid.

[0222] In one aspect is provided a nucleic acid comprising a sequence complementary to SEQ ID NO: 209, or a sequence complementary to a sequence at least 80%, 81%, 82%, 83%, 84%, 85%, 86%, 87%, 88%, 89%, 90%, 91%, 92%, 93%, 94%, 95%, 96%, 97%, 98%, or 99% identical to the nucleotide sequence of SEQ ID NO: 209. In one aspect is provided a nucleic acid comprising a sequence complementary to SEQ ID NO: 212, or a sequence complementary to a sequence at least 80%, 81%, 82%, 83%, 84%, 85%, 86%, 87%, 88%, 89%, 90%, 91%, 92%, 93%, 94%, 95%, 96%, 97%, 98%, or 99% identical to the nucleotide sequence of SEQ ID NO: 212. In one aspect is provided a nucleic acid comprising a sequence complementary to SEQ ID NO: 215, or a sequence complementary to a sequence at least 80%, 81%, 82%, 83%, 84%, 85%, 86%, 87%, 88%, 89%, 90%, 91%, 92%, 93%, 94%, 95%, 96%, 97%, 98%, or 99% identical to the nucleotide sequence of SEQ ID NO: 215. In one aspect is provided a nucleic acid comprising a sequence complementary to SEQ ID NO: 218, or a sequence complementary to a sequence at least 80%, 81%, 82%, 83%, 84%, 85%, 86%, 87%, 88%, 89%, 90%, 91%, 92%, 93%, 94%, 95%, 96%, 97%, 98%, or 99% identical to the nucleotide sequence of SEQ ID NO: 218. In one aspect is provided a nucleic acid comprising a sequence complementary to SEQ ID NO: 221, or a sequence complementary to a sequence at least 80%, 81%, 82%, 83%, 84%, 85%, 86%, 87%, 88%, 89%, 90%, 91%, 92%, 93%, 94%, 95%, 96%, 97%, 98%, or 99% identical to the nucleotide sequence of SEQ ID NO: 221. In one aspect is provided a nucleic acid comprising a sequence complementary to SEQ ID NO: 224, or a sequence complementary to a sequence at least 80%, 81%, 82%, 83%, 84%, 85%, 86%, 87%, 88%, 89%, 90%, 91%, 92%, 93%, 94%, 95%, 96%, 97%, 98%, or 99% identical to the nucleotide sequence of SEQ ID NO: 224. In one aspect is provided a nucleic acid comprising a sequence complementary to SEQ ID NO: 227, or a sequence complementary to a sequence at least 80%, 81%, 82%, 83%, 84%, 85%, 86%, 87%, 88%, 89%, 90%, 91%, 92%, 93%, 94%, 95%, 96%, 97%, 98%, or 99% identical to the nucleotide sequence of SEQ ID NO: 227. In one aspect is provided a nucleic acid comprising a sequence complementary to SEQ ID NO: 230, or a sequence complementary to a sequence at least 80%, 81%, 82%, 83%, 84%, 85%, 86%, 87%, 88%, 89%, 90%, 91%, 92%, 93%, 94%, 95%, 96%, 97%, 98%, or 99% identical to the nucleotide sequence of SEQ ID NO: 230. In one aspect is provided a nucleic acid comprising a sequence complementary to SEQ ID NO: 233, or a sequence complementary to a sequence at least 80%, 81%, 82%, 83%, 84%, 85%, 86%, 87%, 88%, 89%, 90%, 91%, 92%, 93%, 94%, 95%, 96%, 97%, 98%, or 99% identical to the nucleotide sequence of SEQ ID NO: 233. In one aspect is provided a nucleic acid comprising a sequence complementary to SEQ ID NO: 236, or a sequence complementary to a sequence at least 80%, 81%, 82%, 83%, 84%, 85%, 86%, 87%, 88%, 89%, 90%, 91%, 92%, 93%, 94%, 95%, 96%, 97%, 98%, or 99% identical to the nucleotide sequence of SEQ ID NO: 236. In one aspect is provided a nucleic acid comprising a sequence complementary to SEQ ID NO: 239, or a sequence complementary to a sequence at least 80%, 81%, 82%, 83%, 84%, 85%, 86%, 87%, 88%, 89%, 90%, 91%, 92%, 93%, 94%, 95%, 96%, 97%, 98%, or 99% identical to the nucleotide sequence of SEQ ID NO: 239. In one aspect is provided a nucleic acid comprising a sequence complementary to SEQ ID NO: 242, or a sequence complementary to a sequence at least 80%, 81%, 82%, 83%, 84%, 85%, 86%, 87%, 88%, 89%, 90%, 91%, 92%, 93%, 94%, 95%, 96%, 97%, 98%, or 99% identical to the nucleotide sequence of SEQ ID NO: 242. In one aspect is provided a nucleic acid comprising a sequence complementary to SEQ ID NO: 245, or a sequence complementary to a sequence at least 80%, 81%, 82%, 83%, 84%, 85%, 86%, 87%, 88%, 89%, 90%, 91%, 92%, 93%, 94%, 95%, 96%, 97%, 98%, or 99% identical to the nucleotide sequence of SEQ ID NO: 245. In one aspect is provided a nucleic acid comprising a sequence complementary to SEQ ID NO: 248, or a sequence complementary to a sequence at least 80%, 81%, 82%, 83%, 84%, 85%, 86%, 87%, 88%, 89%, 90%, 91%, 92%, 93%, 94%, 95%, 96%, 97%, 98%, or 99% identical to the nucleotide sequence of SEQ ID NO: 248. In one aspect is provided a nucleic acid comprising a sequence complementary to SEQ ID NO: 251, or a sequence complementary to a sequence at least 80%, 81%, 82%, 83%, 84%, 85%, 86%, 87%, 88%, 89%, 90%, 91%, 92%, 93%, 94%, 95%, 96%, 97%, 98%, or 99% identical to the nucleotide sequence of SEQ ID NO: 251. In one aspect is provided a nucleic acid comprising a sequence complementary to SEQ ID NO: 254, or a sequence complementary to a sequence at least 80%, 81%, 82%, 83%, 84%, 85%, 86%, 87%, 88%, 89%, 90%, 91%, 92%, 93%, 94%, 95%, 96%, 97%, 98%, or 99% identical to the nucleotide sequence of SEQ ID NO: 254. In one aspect is provided a nucleic acid comprising a sequence complementary to SEQ ID NO: 257, or a sequence complementary to a sequence at least 80%, 81%, 82%, 83%, 84%, 85%, 86%, 87%, 88%, 89%, 90%, 91%, 92%, 93%, 94%, 95%, 96%, 97%, 98%, or 99% identical to the nucleotide sequence of SEQ ID NO: 257. In one aspect is provided a nucleic acid comprising a sequence complementary to SEQ ID NO: 260, or a sequence complementary to a sequence at least 80%, 81%, 82%, 83%, 84%, 85%, 86%, 87%, 88%, 89%, 90%, 91%, 92%, 93%, 94%, 95%, 96%, 97%, 98%, or 99% identical to the nucleotide sequence of SEQ ID NO: 260. In one aspect is provided a nucleic acid comprising a sequence complementary to SEQ ID NO: 263, or a sequence complementary to a sequence at least 80%, 81%, 82%, 83%, 84%, 85%, 86%, 87%, 88%, 89%, 90%, 91%, 92%, 93%, 94%, 95%, 96%, 97%, 98%, or 99% identical to the nucleotide sequence of SEQ ID NO: 263. In one aspect is provided a nucleic acid comprising a sequence complementary to SEQ ID NO: 266, or a sequence complementary to a sequence at least 80%, 81%, 82%, 83%, 84%, 85%, 86%, 87%, 88%, 89%, 90%, 91%, 92%, 93%, 94%, 95%, 96%, 97%, 98%, or 99% identical to the nucleotide sequence of SEQ ID NO: 266. In one aspect is provided a nucleic acid comprising a sequence complementary to SEQ ID NO: 267, or a sequence complementary to a sequence at least 80%, 81%, 82%, 83%, 84%, 85%, 86%, 87%, 88%, 89%, 90%, 91%, 92%, 93%, 94%, 95%, 96%, 97%, 98%, or 99% identical to the nucleotide sequence of SEQ ID NO: 267. In one aspect is provided a nucleic acid comprising a sequence complementary to SEQ ID NO: 269, or a sequence complementary to a sequence at least 80%, 81%, 82%, 83%, 84%, 85%, 86%, 87%, 88%, 89%, 90%, 91%, 92%, 93%, 94%, 95%, 96%, 97%, 98%, or 99% identical to the nucleotide sequence of SEQ ID NO: 269. In one aspect is provided a nucleic acid comprising a sequence complementary to SEQ ID NO: 270, or a sequence complementary to a sequence at least 80%, 81%, 82%, 83%, 84%, 85%, 86%, 87%, 88%, 89%, 90%, 91%, 92%, 93%, 94%, 95%, 96%, 97%, 98%, or 99% identical to the nucleotide sequence of SEQ ID NO: 270. In one aspect is provided a nucleic acid comprising a sequence complementary to SEQ ID NO: 272, or a sequence complementary to a sequence at least 80%, 81%, 82%, 83%, 84%, 85%, 86%, 87%, 88%, 89%, 90%, 91%, 92%, 93%, 94%, 95%, 96%, 97%, 98%, or 99% identical to the nucleotide sequence of SEQ ID NO: 272. In one aspect is provided a nucleic acid comprising a sequence complementary to SEQ ID NO: 1, or a sequence complementary to a sequence at least 80%, 81%, 82%, 83%, 84%, 85%, 86%, 87%, 88%, 89%, 90%, 91%, 92%, 93%, 94%, 95%, 96%, 97%, 98%, or 99% identical to the nucleotide sequence of SEQ ID NO: 1. In one aspect is provided a nucleic acid comprising a sequence complementary to SEQ ID NO: 20, or a sequence complementary to a sequence at least 80%, 81%, 82%, 83%, 84%, 85%, 86%, 87%, 88%, 89%, 90%, 91%, 92%, 93%, 94%, 95%, 96%, 97%, 98%, or 99% identical to the nucleotide sequence of SEQ ID NO: 20. In one aspect is provided a nucleic acid comprising a sequence complementary to SEQ ID NO: 23, or a sequence complementary to a sequence at least 80%, 81%, 82%, 83%, 84%, 85%, 86%, 87%, 88%, 89%, 90%, 91%, 92%, 93%, 94%, 95%, 96%, 97%, 98%, or 99% identical to the nucleotide sequence of SEQ ID NO: 23. In one aspect is provided a nucleic acid comprising a sequence complementary to SEQ ID NO: 44, or a sequence complementary to a sequence at least 80%, 81%, 82%, 83%, 84%, 85%, 86%, 87%, 88%, 89%, 90%, 91%, 92%, 93%, 94%, 95%, 96%, 97%, 98%, or 99% identical to the nucleotide sequence of SEQ ID NO: 44. In one aspect is provided a nucleic acid comprising a sequence complementary to SEQ ID NO: 47, or a sequence complementary to a sequence at least 80%, 81%, 82%, 83%, 84%, 85%, 86%, 87%, 88%, 89%, 90%, 91%, 92%, 93%, 94%, 95%, 96%, 97%, 98%, or 99% identical to the nucleotide sequence of SEQ ID NO: 47. Any of these nucleic acids may comprise additional sequence from a resistance locus on chromosome 6 of Zea mays. Also provided are maize plants comprising the nucleotide sequence. In various embodiments, the maize plant is more resistant to stalk rot than a comparable maize plant that does not comprise the nucleic acid. In some embodiments, the stalk rot is anthracnose stalk rot. In some embodiments, the stalk rot is Fusarium stalk rot.

[0223] Also provided are nucleic acids that hybridize to any of the above nucleic acids under stringent conditions.

[0224] In another aspect is provided a nucleic acid comprising a nucleotide sequence encoding for a protein comprising the sequence of any one of SEQ ID NO: 211, or a protein comprising a sequence at least 80%, 81%, 82%, 83%, 84%, 85%, 86%, 87%, 88%, 89%, 90%, 91%, 92%, 93%, 94%, 95%, 96%, 97%, 98%, or 99% identical to a protein comprising the sequence of any one of SEQ ID NOS: 211. Also provided is a nucleic acid comprising a nucleotide sequence encoding for a protein comprising the sequence of SEQ ID NO: 214, or a protein comprising a sequence at least 80%, 81%, 82%, 83%, 84%, 85%, 86%, 87%, 88%, 89%, 90%, 91%, 92%, 93%, 94%, 95%, 96%, 97%, 98%, or 99% identical to a protein comprising the sequence of SEQ ID NO: 214. Also provided is a nucleic acid comprising a nucleotide sequence encoding for a protein comprising the sequence of SEQ ID NO: 217, or a protein comprising a sequence at least 80%, 81%, 82%, 83%, 84%, 85%, 86%, 87%, 88%, 89%, 90%, 91%, 92%, 93%, 94%, 95%, 96%, 97%, 98%, or 99% identical to a protein comprising the sequence of SEQ ID NO: 217. Also provided is a nucleic acid comprising a nucleotide sequence encoding for a protein comprising the sequence of SEQ ID NO: 220, or a protein comprising a sequence at least 80%, 81%, 82%, 83%, 84%, 85%, 86%, 87%, 88%, 89%, 90%, 91%, 92%, 93%, 94%, 95%, 96%, 97%, 98%, or 99% identical to a protein comprising the sequence of SEQ ID NO: 220. Also provided is a nucleic acid comprising a nucleotide sequence encoding for a protein comprising the sequence of SEQ ID NO: 223, or a protein comprising a sequence at least 80%, 81%, 82%, 83%, 84%, 85%, 86%, 87%, 88%, 89%, 90%, 91%, 92%, 93%, 94%, 95%, 96%, 97%, 98%, or 99% identical to a protein comprising the sequence of SEQ ID NO: 223. Also provided is a nucleic acid comprising a nucleotide sequence encoding for a protein comprising the sequence of SEQ ID NO: 226, or a protein comprising a sequence at least 80%, 81%, 82%, 83%, 84%, 85%, 86%, 87%, 88%, 89%, 90%, 91%, 92%, 93%, 94%, 95%, 96%, 97%, 98%, or 99% identical to a protein comprising the sequence of SEQ ID NO: 226. Also provided is a nucleic acid comprising a nucleotide sequence encoding for a protein comprising the sequence of SEQ ID NO: 229, or a protein comprising a sequence at least 80%, 81%, 82%, 83%, 84%, 85%, 86%, 87%, 88%, 89%, 90%, 91%, 92%, 93%, 94%, 95%, 96%, 97%, 98%, or 99% identical to a protein comprising the sequence of SEQ ID NO: 229. Also provided is a nucleic acid comprising a nucleotide sequence encoding for a protein comprising the sequence of SEQ ID NO: 232, or a protein comprising a sequence at least 80%, 81%, 82%, 83%, 84%, 85%, 86%, 87%, 88%, 89%, 90%, 91%, 92%, 93%, 94%, 95%, 96%, 97%, 98%, or 99% identical to a protein comprising the sequence of SEQ ID NO: 232. Also provided is a nucleic acid comprising a nucleotide sequence encoding for a protein comprising the sequence of SEQ ID NO: 235, or a protein comprising a sequence at least 80%, 81%, 82%, 83%, 84%, 85%, 86%, 87%, 88%, 89%, 90%, 91%, 92%, 93%, 94%, 95%, 96%, 97%, 98%, or 99% identical to a protein comprising the sequence of SEQ ID NO: 235. Also provided is a nucleic acid comprising a nucleotide sequence encoding for a protein comprising the sequence of SEQ ID NO: 238, or a protein comprising a sequence at least 80%, 81%, 82%, 83%, 84%, 85%, 86%, 87%, 88%, 89%, 90%, 91%, 92%, 93%, 94%, 95%, 96%, 97%, 98%, or 99% identical to a protein comprising the sequence of SEQ ID NO: 238. Also provided is a nucleic acid comprising a nucleotide sequence encoding for a protein comprising the sequence of SEQ ID NO: 241, or a protein comprising a sequence at least 80%, 81%, 82%, 83%, 84%, 85%, 86%, 87%, 88%, 89%, 90%, 91%, 92%, 93%, 94%, 95%, 96%, 97%, 98%, or 99% identical to a protein comprising the sequence of SEQ ID NO: 241. Also provided is a nucleic acid comprising a nucleotide sequence encoding for a protein comprising the sequence of SEQ ID NO: 244, or a protein comprising a sequence at least 80%, 81%, 82%, 83%, 84%, 85%, 86%, 87%, 88%, 89%, 90%, 91%, 92%, 93%, 94%, 95%, 96%, 97%, 98%, or 99% identical to a protein comprising the sequence of SEQ ID NO: 244. Also provided is a nucleic acid comprising a nucleotide sequence encoding for a protein comprising the sequence of SEQ ID NO: 247, or a protein comprising a sequence at least 80%, 81%, 82%, 83%, 84%, 85%, 86%, 87%, 88%, 89%, 90%, 91%, 92%, 93%, 94%, 95%, 96%, 97%, 98%, or 99% identical to a protein comprising the sequence of SEQ ID NO: 247. Also provided is a nucleic acid comprising a nucleotide sequence encoding for a protein comprising the sequence of SEQ ID NO: 250, or a protein comprising a sequence at least 80%, 81%, 82%, 83%, 84%, 85%, 86%, 87%, 88%, 89%, 90%, 91%, 92%, 93%, 94%, 95%, 96%, 97%, 98%, or 99% identical to a protein comprising the sequence of SEQ ID NO: 250. Also provided is a nucleic acid comprising a nucleotide sequence encoding for a protein comprising the sequence of SEQ ID NO: 253, or a protein comprising a sequence at least 80%, 81%, 82%, 83%, 84%, 85%, 86%, 87%, 88%, 89%, 90%, 91%, 92%, 93%, 94%, 95%, 96%, 97%, 98%, or 99% identical to a protein comprising the sequence of SEQ ID NO: 253. Also provided is a nucleic acid comprising a nucleotide sequence encoding for a protein comprising the sequence of SEQ ID NO: 256, or a protein comprising a sequence at least 80%, 81%, 82%, 83%, 84%, 85%, 86%, 87%, 88%, 89%, 90%, 91%, 92%, 93%, 94%, 95%, 96%, 97%, 98%, or 99% identical to a protein comprising the sequence of SEQ ID NO: 256. Also provided is a nucleic acid comprising a nucleotide sequence encoding for a protein comprising the sequence of SEQ ID NO: 259, or a protein comprising a sequence at least 80%, 81%, 82%, 83%, 84%, 85%, 86%, 87%, 88%, 89%, 90%, 91%, 92%, 93%, 94%, 95%, 96%, 97%, 98%, or 99% identical to a protein comprising the sequence of SEQ ID NO: 259. Also provided is a nucleic acid comprising a nucleotide sequence encoding for a protein comprising the sequence of SEQ ID NO: 262, or a protein comprising a sequence at least 80%, 81%, 82%, 83%, 84%, 85%, 86%, 87%, 88%, 89%, 90%, 91%, 92%, 93%, 94%, 95%, 96%, 97%, 98%, or 99% identical to a protein comprising the sequence of SEQ ID NO: 262. Also provided is a nucleic acid comprising a nucleotide sequence encoding for a protein comprising the sequence of SEQ ID NO: 265, or a protein comprising a sequence at least 80%, 81%, 82%, 83%, 84%, 85%, 86%, 87%, 88%, 89%, 90%, 91%, 92%, 93%, 94%, 95%, 96%, 97%, 98%, or 99% identical to a protein comprising the sequence of SEQ ID NO: 265. Also provided is a nucleic acid comprising a nucleotide sequence encoding for a protein comprising the sequence of SEQ ID NO: 268, or a protein comprising a sequence at least 80%, 81%, 82%, 83%, 84%, 85%, 86%, 87%, 88%, 89%, 90%, 91%, 92%, 93%, 94%, 95%, 96%, 97%, 98%, or 99% identical to a protein comprising the sequence of SEQ ID NO: 268. Also provided is a nucleic acid comprising a nucleotide sequence encoding for a protein comprising the sequence of SEQ ID NO: 271, or a protein comprising a sequence at least 80%, 81%, 82%, 83%, 84%, 85%, 86%, 87%, 88%, 89%, 90%, 91%, 92%, 93%, 94%, 95%, 96%, 97%, 98%, or 99% identical to a protein comprising the sequence of SEQ ID NO: 271.

[0225] In another aspect is provided a nucleic acid comprising a nucleotide sequence encoding for a protein comprising the sequence of any one of SEQ ID NOs: 11-19, or a protein comprising a sequence at least 80%, 81%, 82%, 83%, 84%, 85%, 86%, 87%, 88%, 89%, 90%, 91%, 92%, 93%, 94%, 95%, 96%, 97%, 98%, or 99% identical to a protein comprising the sequence of any one of SEQ ID NOS: 11-19. Also provided is a nucleic acid comprising a nucleotide sequence encoding for a protein comprising the sequence of SEQ ID NO: 22, or a protein comprising a sequence at least 80%, 81%, 82%, 83%, 84%, 85%, 86%, 87%, 88%, 89%, 90%, 91%, 92%, 93%, 94%, 95%, 96%, 97%, 98%, or 99% identical to a protein comprising the sequence of SEQ ID NO: 22. Also provided is a nucleic acid comprising a nucleotide sequence encoding for a protein comprising the sequence of any one of SEQ ID NOS: 34-43, or a protein comprising a sequence at least 80%, 81%, 82%, 83%, 84%, 85%, 86%, 87%, 88%, 89%, 90%, 91%, 92%, 93%, 94%, 95%, 96%, 97%, 98%, or 99% identical to a protein comprising the sequence of any one of SEQ ID NOS: 34-43.

[0226] Also provided is a nucleic acid comprising a nucleotide sequence encoding for a protein comprising the sequence of SEQ ID NO: 46, or a protein comprising a sequence at least 80%, 81%, 82%, 83%, 84%, 85%, 86%, 87%, 88%, 89%, 90%, 91%, 92%, 93%, 94%, 95%, 96%, 97%, 98%, or 99% identical to a protein comprising the sequence of SEQ ID NO: 46. Also provided is a nucleic acid comprising a nucleotide sequence encoding for a protein comprising the sequence of SEQ ID NO: 49, or a protein comprising a sequence at least 80%, 81%, 82%, 83%, 84%, 85%, 86%, 87%, 88%, 89%, 90%, 91%, 92%, 93%, 94%, 95%, 96%, 97%, 98%, or 99% identical to a protein comprising the sequence of SEQ ID NO: 49.

[0227] In another aspect is provided a nucleic acid molecule encoding a Rcg1 resistance allele having a haplotype comprising one or more single nucleotide polymorphism selected from the group consisting of:
[0228] a. a “C” at position 413 referenced to SEQ ID NO: 50,
[0229] b. a “C” at position 958 referenced to SEQ ID NO: 50,
[0230] c. a “C” at position 971 referenced to SEQ ID NO: 50,
[0231] d. a “T” at position 1099 referenced to SEQ ID NO: 50,
[0232] e. an “A” at position 1154 referenced to SEQ ID NO: 50,
[0233] f. a “T” at position 1250 referenced to SEQ ID NO: 50,
[0234] g. a “G” at position 1607 referenced to SEQ ID NO: 50,
[0235] h. a “G” at position 2001 referenced to SEQ ID NO: 50,
[0236] i. an “A” at position 2598 referenced to SEQ ID NO: 50, and
[0237] j. an “A” at position 3342 referenced to SEQ ID NO: 50, where the nucleic acid molecule is encoding a polypeptide capable of conferring or increasing resistance to a plant disease caused by fungal pathogen in a plant in which the polypeptide is expressed.

[0238] The resistance allele is found on chromosome 4 of Zea mays. In various embodiments, the nucleic acid molecule does not produce the amplicon (e.g., amplicon 7) according to SEQ ID NO: 119 upon polymerase chain reaction amplification by means of primers of SEQ ID NO: 120 and 121, primers of SEQ ID NO: 122 and 123, or primers of SEQ ID NO: 124 and 125. In various embodiments, the nucleic acid molecule does not produce an amplicon selected from the group consisting of SEQ ID NOs: 94, 101, 106, 109, and 114 (e.g., amplicons 2-6) upon polymerase chain reaction amplification by means of primers of SEQ ID NOs: 95 and 96, primers of SEQ ID NOs: 97 and 98, primers of SEQ ID NOs: 99 and 100, primers of SEQ ID NOs: 101 and 102, primers of SEQ ID NOs: 103 and 104, primers of SEQ ID NOs: 105 and 106, primers of SEQ ID NOs: 107 and 108, primers of SEQ ID NOs: 109 and 110, primers of SEQ ID NOs: 111 and 112, primers of SEQ ID NOs: 113 and 114, primers of SEQ ID NOs: 115 and 116, or primers of SEQ ID NOs: 117 and 118.

[0239] Also provided are isolated or substantially purified polynucleotide compositions comprising one or more of the above nucleic acid molecules. An “isolated” or “purified” polynucleotide, or biologically active portion thereof, is substantially or essentially free from components that normally accompany or interact with the polynucleotide or protein as found in its naturally occurring environment. Thus, an isolated or purified polynucleotide is substantially free of other cellular material, or culture medium when produced by recombinant techniques (e.g. PCR amplification), or substantially free of chemical precursors or other chemicals when chemically synthesized. Optimally, an “isolated” polynucleotide is free of sequences (for example, protein encoding sequences) that naturally flank the polynucleotide (i.e., sequences located at the 5′ and 3′ ends of the polynucleotide) in the genomic DNA of the organism from which the polynucleotide is derived. For example, in various embodiments, the isolated polynucleotide can contain less than about 5 kb, about 4 kb, about 3 kb, about 2 kb, about 1 kb, about 0.5 kb, or about 0.1 kb of nucleotide sequence that naturally flank the polynucleotide in genomic DNA of the cell from which the polynucleotide is derived.

### Expression Cassettes

[0240] The terms “recombinant construct,” “expression cassette,” “expression construct,” “chimeric construct,” “construct,” “recombinant DNA construct” and “recombinant DNA fragment” are used interchangeably herein and are nucleic acid fragments or refer to a construct assembled from nucleic acid fragments, which may be obtained from different sources or organisms. A recombinant construct comprises an artificial combination of nucleic acid fragments, including, and not limited to, regulatory and coding sequences that are not found together in nature. For example, a recombinant DNA construct may comprise regulatory sequences and coding sequences that are derived from different sources, or regulatory sequences and coding sequences derived from the same source and arranged in a manner different than that found in nature or that may be combined according to the needs of a person skilled in the art. Such construct may be used by itself or may be used in conjunction with a vector. If a vector is used, then the choice of vector is dependent upon the method that will be used to transform host cells as is well known to those skilled in the art. Suitable vectors may be a plasmid vector, a viral vector, a cosmid, bacmid or artificial chromosome. Further, non-limiting examples may be the Ti-plasmid of Agrobacterium tumefaciens or the viral DNA vector derived from plant viruses. The skilled artisan is well aware of the genetic elements that must be present on the vector in order to successfully transform, select and propagate host cells comprising any of the isolated nucleic acid fragments of the embodiments. Screening to obtain lines displaying the desired expression level and pattern of the polynucleotides or of the anthracnose stalk rot resistance locus may be accomplished by amplification, Southern analysis of DNA, northern blot analysis of mRNA expression, immunoblotting analysis of protein expression, phenotypic analysis, and the like.

[0241] In various aspects are provided expression cassettes comprising any of the nucleic acids and polynucleotides described herein. The nucleic acid or polynucleotide may comprise sequence from the resistance locus on chromosome 4. The nucleic acid or polynucleotide may comprise sequence from the resistance locus on chromosome 6. The nucleic acid or polynucleotide may comprise one or more sequences from both the resistance locus on chromosome 4 and the resistance locus on chromosome 6.

[0242] In some embodiments, expression cassettes comprising a promoter operably linked to a heterologous nucleotide sequence of the embodiments are further provided. The expression cassettes of the embodiments find use in generating transformed plants, plant cells, and microorganisms and in practicing the methods for inducing plant fungal pathogen resistance disclosed herein. The expression cassette will include 5′ and 3′ regulatory sequences operably linked to a polynucleotide of the embodiments. “Operably linked” is intended to mean a functional linkage between two or more elements. “Regulatory sequences” refer to nucleotides located upstream (5′ non-coding sequences), within, or downstream (3′ non-coding sequences) of a coding sequence, and which may influence the transcription, RNA processing, stability, or translation of the associated coding sequence. Regulatory sequences may include, and are not limited to, promoters, translation leader sequences, introns, and polyadenylation recognition sequences. For example, an operable linkage between a polynucleotide of interest and a regulatory sequence (a promoter, for example) is functional link that allows for expression of the polynucleotide of interest. Operably linked elements may be contiguous or non-contiguous. When used to refer to the joining of two protein coding regions, by operably linked is intended that the coding regions are in the same reading frame. The cassette may additionally contain at least one additional gene to be co-transformed into the organism. Alternatively, the additional gene(s) can be provided on multiple expression cassettes. Such an expression cassette is provided with a plurality of restriction sites and/or recombination sites for insertion of the polynucleotide that encodes an antipathogenic polypeptide to be under the transcriptional regulation of the regulatory regions. The expression cassette may additionally contain selectable marker genes.

[0243] The expression cassette can include in the 5′-3′ direction of transcription, a transcriptional initiation region (i.e., a promoter), translational initiation region, a polynucleotide of the embodiments, a translational termination region and, optionally, a transcriptional termination region functional in the host organism. The regulatory regions (i.e., promoters, transcriptional regulatory regions, and translational termination regions) and/or the polynucleotide of the embodiments may be native/analogous to the host cell or to each other. Alternatively, the regulatory regions and/or the polynucleotide of the embodiments may be heterologous to the host cell or to each other. As used herein, “heterologous” in reference to a sequence is a sequence that originates from a foreign species, or, if from the same species, is substantially modified from its native form in composition and/or genomic locus by deliberate human intervention. For example, a promoter operably linked to a heterologous polynucleotide is from a species different from the species from which the polynucleotide was derived, or, if from the same/analogous species, one or both are substantially modified from their original form and/or genomic locus, or the promoter is not the native promoter for the operably linked polynucleotide.

[0244] The optionally included termination region may be native with the transcriptional initiation region, may be native with the operably linked polynucleotide of interest, may be native with the plant host, or may be derived from another source (i.e., foreign or heterologous) to the promoter, the polynucleotide of interest, the host, or any combination thereof. Convenient termination regions are available from the Ti-plasmid of A. tumefaciens, such as the octopine synthase and nopaline synthase termination regions. In particular embodiments, the potato protease inhibitor II gene (PinII) terminator is used. See, for example, Keil et al., Nucl. Acids Res., 1986, 14:5641-5650; and An et al., Plant Cell, 1989, 1:115-122, herein incorporated by reference in their entirety.

[0245] A number of promoters can be used in the practice of the embodiments, including the native promoter of the polynucleotide sequence of interest. The promoters can be selected based on the desired outcome. A wide range of plant promoters are discussed in the recent review of Potenza et al., In Vitro Cell Dev Biol-Plant, 2004, 40:1-22, herein incorporated by reference. For example, the nucleic acids can be combined with constitutive, tissue-preferred, pathogen-inducible, or other promoters for expression in plants. Such constitutive promoters include, for example, the core promoter of the Rsyn7 promoter.

[0246] It may be beneficial to express the gene from an inducible promoter, particularly from a pathogen-inducible promoter. Such promoters include those from pathogenesis-related proteins (PR proteins), which are induced following infection by a pathogen; e.g., PR proteins, SAR proteins, beta-1,3-glucanase, chitinase, etc. See WO 99/43819, which is incorporated by reference herein in its entirety. Also of interest are promoters that result in expression of a protein locally at or near the site of pathogen infection. Of particular interest is the inducible promoter for the maize PRms gene, whose expression is induced by the pathogen Fusarium moniliforme (see, for example, Cordero et al. (1992) Physiol. Mol. Plant. Path. 41:189-200).

[0247] Additionally, as pathogens find entry into plants through wounds or insect damage, a wound-inducible promoter may be used in the constructions of the embodiments. Exemplary wound-inducible promoters include, but are not limited to, potato proteinase inhibitor (pin II) gene, wun1, wun2, win1, win2, WIP1, and MPI.

[0248] Chemical-regulated promoters can be used to modulate the expression of a gene in a plant through the application of an exogenous chemical regulator or agent. Depending upon the objective, the promoter may be a chemical-inducible promoter, where application of the chemical induces gene expression, or a chemical-repressible promoter, where application of the chemical represses gene expression. Chemical-inducible promoters are known in the art and include, and are not limited to, the maize In2-2 promoter, which is activated by benzenesulfonamide herbicide safeners, the maize GST promoter, which is activated by hydrophobic electrophilic compounds that are used as pre-emergent herbicides, and the tobacco PR-la promoter, which is activated by salicylic acid. Other chemical-regulated promoters of interest include steroid-responsive promoters and tetracycline-inducible and tetracycline-repressible promoters.

[0249] Tissue-specific promoters can be utilized to target enhanced expression of the polypeptides of the embodiments within a particular plant tissue. For example, a tissue-specific promoter may be used to express a polypeptide in a plant tissue where disease resistance is particularly important, such as, for example, the roots, the stalk or the leaves. Such promoters can be modified, if necessary, for weak expression. Vascular tissue-preferred promoters are known in the art and include those promoters that selectively drive protein expression in, for example, xylem and phloem tissue. Stalk-preferred promoters may be used to drive expression of a polypeptide of the embodiments. Exemplary stalk-preferred promoters include the maize MS8-15 gene promoter (see, for example, U.S. Pat. No. 5,986,174 and International Publication No. WO 98/00533), and those found in Graham et al., (1997) Plant Mol Biol 33(4): 729-735.

[0250] Leaf-specific promoters may be used, such as those described in any of Yamamoto et al. Plant J., 1997, 12(2):255-265; Kwon et al., Plant Physiol., 1994, 105:357-67; Yamamoto et al., Plant Cell Physiol., 1994, 35(5):773-778; Gotor et al., Plant J., 1993, 3:509-18; Orozco et al., Plant Mol. Biol., 1993, 23(6):1129-1138; and Matsuoka et al., Proc. Natl. Acad. Sci. USA, 1993, 90(20):9586-9590.

[0251] Root-specific promoters may be used. Exemplary root-specific promoters include the soybean root-specific glutamine synthetase gene, a root-specific control element in the GRP 1.8 gene of French bean); Sanger et al. (1990) Plant Mol. Biol. 14(3):433-443 (root-specific promoter of the mannopine synthase (MAS) gene of Agrobacterium tumefaciens); and Miao et al. (1991) Plant Cell 3(1):11-22 (full-length cDNA clone encoding cytosolic glutamine synthetase (GS), which is expressed in roots and root nodules of soybean). Further root-specific promoters include the VfENOD-GRP3 gene promoter the rolB promoter. See also U.S. Pat. Nos. 5,837,876; 5,750,386; 5,633,363; 5,459,252; 5,401,836; 5,110,732; and 5,023,179, all of which are incorporated by reference.

[0252] “Seed-preferred” promoters include both “seed-specific” promoters (those promoters active during seed development such as promoters of seed storage proteins) as well as “seed-germinating” promoters (those promoters active during seed germination). See Thompson et al., (1989) BioEssays 10:108, herein incorporated by reference. Such seed-preferred promoters include, and are not limited to, Cim1 (cytokinin-induced message); cZ19B1 (maize 19 kDa zein); milps (myo-inositol-1-phosphate synthase) (see WO 00/11177 and U.S. Pat. No. 6,225,529; herein incorporated by reference). Gamma-zein is a preferred endosperm-specific promoter. Glob-1 is a preferred embryo-specific promoter. For dicots, seed-specific promoters include, and are not limited to, bean β-phaseolin, napin, β-conglycinin, soybean lectin, cruciferin, and the like. For monocots, seed-specific promoters include, and are not limited to, maize 15 kDa zein, 22 kDa zein, 27 kDa zein, g-zein, waxy, shrunken 1, shrunken 2, globulin 1, etc. See also WO 00/12733, where seed-preferred promoters from end1 and end2 genes are disclosed; herein incorporated by reference.

[0253] Additional sequence modifications are known to enhance gene expression in a cellular host. These include elimination of sequences encoding spurious polyadenylation signals, exon-intron splice site signals, transposon-like repeats, and other such well-characterized sequences that may be deleterious to gene expression. The G-C content of the sequence may be adjusted to levels average for a given cellular host, as calculated by reference to known genes expressed in the host cell. When possible, the sequence is modified to avoid predicted hairpin secondary mRNA structures.

[0254] Expression cassettes may additionally contain 5′ leader sequences. Such leader sequences can act to enhance translation. Translation leaders are known in the art and include: picornavirus leaders, for example, EMCV leader (Encephalomyocarditis 5′ noncoding region) (Elroy-Stein et al., Proc. Natl. Acad. Sci. USA, 1989, 86:6126-6130); potyvirus leaders, for example, TEV leader (Tobacco Etch Virus) (Gallie et al., Gene, 1995, 165(2):233-238), MDMV leader (Maize Dwarf Mosaic Virus), and human immunoglobulin heavy-chain binding protein (BiP) (Macejak et al., Nature, 1991, 353:90-94); untranslated leader from the coat protein mRNA of alfalfa mosaic virus (AMV RNA 4) (Jobling et al., Nature, 1987, 325:622-625); tobacco mosaic virus leader (TMV) (Gallie et al., Molecular Biology of RNA, ed. Cech (Liss, New York), 1989, pp. 237-256); and maize chlorotic mottle virus leader (MCMV) (Lommel et al., Virology, 1991, 81:382-385). See also, Della-Cioppa et al., Plant Physiol., 1987, 84:965-968. Other methods known to enhance translation can also be utilized, for example, introns, and the like.

[0255] In the expression cassette, the various DNA fragments may be configured to be in the proper orientation and, as appropriate, in the proper reading frame. Adapters or linkers may be employed to join the DNA fragments. Other modifications may be made to the expression cassette to provide for convenient restriction sites, removal of superfluous DNA, removal of restriction sites, or the like. For this purpose, in vitro mutagenesis, primer repair, restriction, annealing, resubstitutions, e.g., transitions and transversions, may be involved.

[0256] The expression cassette can also comprise a selectable marker gene for the selection of transformed cells. Selectable marker genes are utilized for the selection of transformed cells or tissues. Marker genes include genes encoding antibiotic resistance, such as those encoding neomycin phosphotransferase II (NEO) and hygromycin phosphotransferase (HPT), as well as genes conferring resistance to herbicidal compounds, such as glufosinate ammonium, bromoxynil, imidazolinones, and 2,4-dichlorophenoxyacetate (2,4-D). Additional selectable markers include phenotypic markers such as β-galactosidase and fluorescent proteins such as green fluorescent protein (GFP) (Su et al., Biotechnol Bioeng, 2004, 85:610-9 and Fetter et al., Plant Cell, 2004, 16:215-28), cyan florescent protein (CYP) (Bolte et al., J. Cell Science, 2004, 117:943-54 and Kato et al., Plant Physiol, 2002, 129:913-42), and yellow florescent protein (PHIYFP™ fluorescent protein from Evrogen, see, Bolte et al., J. Cell Science, 2004, 117:943-54). For additional selectable markers, see generally, Yarranton, Curr. Opin. Biotech., 1992, 3:506-511; Christopherson et al., Proc. Natl. Acad. Sci. USA, 1992, 89:6314-6318; Yao et al., Cell, 1992, 71:63-72; Reznikoff, Mol. Microbiol., 1992, 6:2419-2422; Barkley et al., The Operon, 1980, pp. 177-220; Hu et al., Cell, 1987, 48:555-566; Brown et al., Cell, 1987, 49:603-612; Figge et al. (1988) Cell 52:713-722; Deuschle et al., Proc. Natl. Acad. Aci. USA, 1989, 86:5400-5404; Fuerst et al., Proc. Natl. Acad. Sci. USA, 1989, 86:2549-2553; Deuschle et al., Science, 1990, 248:480-483; Gossen (1993) Ph.D. Thesis, University of Heidelberg; Reines et al. Proc. Natl. Acad. Sci. USA, 1993, 90:1917-1921; Labow et al., Mol. Cell. Biol., 1990, 10:3343-3356; Zambretti et al., Proc. Natl. Acad. Sci. USA, 1992, 89:3952-3956; Baim et al., Proc. Natl. Acad. Sci. USA, 1991, 88:5072-5076; Wyborski et al., Nucleic Acids Res., 1991, 19:4647-4653; Hillenand-Wissman, Topics Mol. Struc. Biol., 1989, 10:143-162; Degenkolb et al., Antimicrob. Agents Chemother., 1991, 35:1591-1595; Kleinschnidt et al., Biochemistry, 1988, 27:1094-1104; Bonin (1993) Ph.D. Thesis, University of Heidelberg; Gossen et al., Proc. Natl. Acad. Sci. USA, 1992, 89:5547-5551; Oliva et al., Antimicrob. Agents Chemother., 1992, 36:913-919; Hlavka et al., Handbook of Experimental Pharmacology, 1985, Vol. 78 (Springer-Verlag, Berlin); Gill et al., Nature, 1988, 334:721-724. Such disclosures are herein incorporated by reference. The above list of selectable marker genes is not meant to be limiting. Any selectable marker gene can be used in the embodiments.

[0257] The gene of the embodiments can be expressed as a transgene in order to make plants resistant to pathogens, e.g., those that cause stalk rot. In some embodiments, the stalk rot is anthracnose stalk rot. In some embodiments, the stalk rot is Fusarium stalk rot. Using various different promoters described herein can allow for expression of the gene in a modulated form in different circumstances. For example, one might desire higher levels of expression in stalks to enhance resistance to stalk rot. In environments where leaf blight is a problem, lines with higher expression levels in leaves could be used. However, one can also insert the entire gene, both native promoter and coding sequence, as a transgene. Finally, using the gene of the embodiments as a transgene will allow quick combination with other traits, such as insect or herbicide resistance.

[0258] In certain embodiments, the nucleic acid sequences of the embodiments can be stacked with any combination of polynucleotide sequences of interest in order to create plants with a desired phenotype. This stacking may be accomplished by a combination of genes within the DNA construct, or by crossing with another line that comprises the combination. For example, the polynucleotides of the embodiments may be stacked with any other polynucleotides of the embodiments, or with other genes. The combinations generated can also include multiple copies of any one of the polynucleotides of interest. The polynucleotides of the embodiments can also be stacked with any other gene or combination of genes to produce plants with a variety of desired trait combinations including and not limited to traits desirable for animal feed such as high oil genes (e.g., U.S. Pat. No. 6,232,529); balanced amino acids (e.g. hordothionins (U.S. Pat. Nos. 5,990,389; 5,885,801; 5,885,802; and 5,703,409); barley high lysine (Williamson et al. (1987) Eur. J. Biochem. 165:99-106; and WO 98/20122); and high methionine proteins (Pedersen et al., J. Biol. Chem., 1986, 261:6279; Kirihara et al., Gene, 1988, 71:359; and Musumura et al., Plant Mol. Biol., 1989, 12: 123)); increased digestibility (e.g., modified storage proteins (U.S. Pat. No. 6,858,778); and thioredoxins (U.S. Pat. No. 7,009,087)), the disclosures of which are herein incorporated by reference. The polynucleotides of the embodiments can also be stacked with traits desirable for insect, disease or herbicide resistance (e.g., Bacillus thuringiensis toxic proteins (U.S. Pat. Nos. 5,366,892; 5,747,450; 5,737,514; 5,723,756; 5,593,881; Geiser et al., Gene, 1986, 48:109); lectins (Van Damme et al., Plant Mol. Biol., 1994, 24:825); fumonisin detoxification genes (U.S. Pat. No. 5,792,931); avirulence and disease resistance genes (Jones et al., Science, 1994, 266:789; Martin et al., Science, 1993, 262:1432; Mindrinos et al., Cell, 1994, 78:1089); acetolactate synthase (ALS) mutants that lead to herbicide resistance such as the S4 and/or Hra mutations; inhibitors of glutamine synthase such as phosphinothricin or basta (e.g., bar gene); and glyphosate resistance (EPSPS genes, GAT genes such as those disclosed in U.S. Pat. No. 7,462,481, also WO02/36782 and WO03/092360)); and traits desirable for processing or process products such as high oil (e.g., U.S. Pat. No. 6,232,529); modified oils (e.g., fatty acid desaturase genes (U.S. Pat. No. 5,952,544; WO 94/11516)); modified starches (e.g., ADPG pyrophosphorylases (AGPase), starch synthases (SS), starch branching enzymes (SBE) and starch debranching enzymes (SDBE)); and polymers orbioplastics (e.g., U.S. Pat. No. 5,602,321; beta-ketothiolase, polyhydroxybutyrate synthase, and acetoacetyl-CoA reductase (Schubert et al., J. Bacteriol. 1988, 170:5837-5847) facilitate expression of polyhydroxyalkanoates (PHAs)), the disclosures of which are herein incorporated by reference. One could also combine the polynucleotides of the embodiments with polynucleotides providing agronomic traits such as male sterility (e.g., see U.S. Pat. No. 5,583,210), stalk strength, flowering time, or transformation technology traits such as cell cycle regulation or gene targeting (e.g. WO 99/61619; WO 00/17364; WO 99/25821), the disclosures of which are herein incorporated by reference.

[0259] These stacked combinations can be created by any method including and not limited to cross breeding plants by any conventional or TOPCROSS® breeding methodology, or genetic transformation. If the traits are stacked by genetically transforming the plants, the polynucleotide sequences of interest can be combined at any time and in any order. For example, a transgenic plant comprising one or more desired traits can be used as the target to introduce further traits by subsequent transformation. The traits can be introduced simultaneously in a co-transformation protocol with the polynucleotides of interest provided by any combination of transformation cassettes. For example, if two sequences will be introduced, the two sequences can be contained in separate transformation cassettes (trans) or contained on the same transformation cassette (cis). Expression of the sequences can be driven by the same promoter or by different promoters. In certain cases, it may be desirable to introduce a transformation cassette that will suppress the expression of the polynucleotide of interest. This may be combined with any combination of other suppression cassettes or overexpression cassettes to generate the desired combination of traits in the plant.

Introducing Polypeptides or Polynucleotides into Plants

[0260] The methods of the embodiments may involve, and are not limited to, introducing a polypeptide or polynucleotide into a plant or plant cell. “Introducing” is intended to mean presenting to the plant the polynucleotide. In some embodiments, the polynucleotide will be presented in such a manner that the sequence gains access to the interior of a cell of the plant, including its potential insertion into the genome of a plant. The methods of the embodiments do not depend on a particular method for introducing a sequence into a plant, only that the polynucleotide gains access to the interior of at least one cell of the plant. Methods for introducing polynucleotides into plants are known in the art including, and not limited to, stable transformation methods, transient transformation methods, and virus-mediated methods.

[0261] In various embodiments, one or more of the following polynucleotides may be introduced into the plant:
[0262] i. a nucleotide sequence of SEQ ID NO: 209, 212, 215, 218, 221, 224, 227, 230, 233, 236, 239, 242, 245, 248, 251, 254, 257, 260, 263, 266 or 269, preferably of SEQ ID NO: 266 or 269,
[0263] ii. a nucleotide sequence having a coding sequence of SEQ ID NO: 210, 213, 216, 219, 222, 225, 228, 231, 234, 237, 240, 243, 246, 249, 252, 255, 258, 261, 264, 267 or 270, preferably of SEQ ID NO: 267 or 270,
[0264] iii. a nucleotide sequence which is complementary to a sequence from i. or ii.,
[0265] iv. a nucleotide sequence which has at least 80% or 85%, preferably at least 90%, 91%, 92%, 93%, 94% or 95%, more preferably at least 96%, 97%, 98% or 99% identity with a sequence from i., ii. or iii.,
[0266] v. a nucleotide sequence which differs from a nucleic acid sequence according to i., ii. or iii. depending on the degeneracy of the genetic code,
[0267] vi. a nucleotide sequence which hybridizes with a nucleic acid sequence according to i., ii. or iii. under stringent conditions,
[0268] vii. a nucleotide sequence which encodes for a protein comprising the sequence of SEQ ID NO: 211, 214, 217, 220, 223, 226, 229, 232, 235, 238, 241, 244, 247, 250, 253, 256, 259, 262, 265, 268 or 271, preferably which encodes for a protein comprising the sequence of SEQ ID NO: 268 or 271, or
[0269] viii. a nucleotide sequence which encodes for a protein which has at least 80% or 85%, preferably at least 90%, 91%, 92%, 93%, 94% or 95%, more preferably at least 960%, 97%, 98% or 99% identity with a sequence of SEQ ID NO: 211, 214, 217, 220, 223, 226, 229, 232, 235, 238, 241, 244, 247, 250, 253, 256, 259, 262, 265, 268 or 271, preferably with a sequence of SEQ ID NO: 268 or 271.

[0270] In various embodiments, a polypeptide comprising a sequence at least 80%, 81%, 82%, 83%, 84%, 85%, 86%, 87%, 88%, 89%, 90%, 91%, 92%, 93%, 94%, 95%, 96%, 97%, 98%, 99% or 100% identity to SEQ ID NO: 211, 214, 217, 220, 223, 226, 229, 232, 235, 238, 241, 244, 247, 250, 253, 256, 259, 262, 265, 268 or 271, preferably to SEQ ID NO: 268 or 271, is introduced into the plant.

[0271] Transformation protocols as well as protocols for introducing polypeptides or polynucleotide sequences into plants may vary depending on the type of plant or plant cell, i.e., monocot or dicot, targeted for transformation. Suitable methods of introducing polypeptides and polynucleotides into plant cells include microinjection (Crossway et al., Biotechniques, 1986, 4:320-334), electroporation (Riggs et al., Proc. Natl. Acad. Sci. USA, 1986, 83:5602-5606, Agrobacterium-mediated transformation (U.S. Pat. Nos. 5,563,055- and 5,981,840), direct gene transfer (Paszkowski et al., EMBO J., 1984, 3:2717-2722), and ballistic particle acceleration (see, for example, Sanford et al., U.S. Pat. Nos. 4,945,050; 5,879,918; 5,886,244; and U.S. Pat. No. 5,932,782; McCabe et al., Biotechnology, 1988, 6:923-926); and Lec transformation (WO 00/28058). Also see, Weissinger et al., Ann. Rev. Genet., 1988, 22:421-477; Sanford et al., Particulate Science and Technology, 1987, 5:27-37 (onion); Christou et al., Plant Physiol., 1988, 87:671-674 (soybean); McCabe et al., Bio/Technology, 1988, 6:923-926 (soybean); Finer and McMullen, In Vitro Cell Dev. Biol., 1991, 27P:175-182 (soybean); Singh et al., Theor. Appl. Genet., 1998, 96:319-324 (soybean); Datta et al., Biotechnology, 1990, 8:736-740 (rice); Klein et al., Proc. Natl. Acad. Sci. USA, 1988, 85:4305-4309 (maize); Klein et al., Biotechnology, 1988, 6:559-563 (maize); U.S. Pat. Nos. 5,240,855; 5,322,783 and 5,324,646; Klein et al., Plant Physiol., 1988, 91:440-444 (maize); Fromm et al., Biotechnology, 1990, 8:833-839 (maize); Hooykaas-Van Slogteren et al., Nature, 1984, (London) 311:763-764; U.S. Pat. No. 5,736,369; Bytebier et al., Proc. Natl. Acad. Sci. USA, 1987, 84:5345-5349 (Liliaceae); De Wet et al., The Experimental Manipulation of Ovule Tissues, ed. Chapman et al. (Longman, New York), 1985, pp. 197-209 (pollen); Kaeppler et al., Plant Cell Reports, 1990, 9:415-418 and Kaeppler et al., Theor. Appl. Genet., 1992, 84:560-566 (whisker-mediated transformation); D'Halluin et al., Plant Cell, 1992, 4:1495-1505 (electroporation); Li et al., Plant Cell Reports, 1993, 12:250-255 and Christou and Ford, Annals of Botany, 1995, 75:407-413 (rice); Osjoda et al., Nature Biotechnology, 1996, 14:745-750 (maize via Agrobacterium tumefaciens); all of which are herein incorporated by reference.

[0272] Methods for the targeted insertion of a polynucleotide at a specific location in the plant genome are known in the art. In one embodiment, the insertion of the polynucleotide at a desired genomic location is achieved using a site-specific recombination system. See, for example, WO99/25821, WO99/25854, WO99/25840, WO99/25855, and WO99/25853, all of which are herein incorporated by reference. Briefly, the polynucleotide of the embodiments can be contained in transfer cassette flanked by two non-identical recombination sites. The transfer cassette is introduced into a plant or a plant cell have stably incorporated into its genome a target site which is flanked by two non-identical recombination sites that correspond to the sites of the transfer cassette. An appropriate recombinase is provided and the transfer cassette is integrated at the target site. The polynucleotide of interest may then be integrated from the transfer cassette to a specific chromosomal position in the plant genome.

[0273] The cells that have been transformed may be grown into plants in accordance with conventional ways. See, for example, McCormick et al., Plant Cell Reports, 1986, 5:81-84. These plants may then be grown, and either pollinated with the same transformed strain or different strains, and the resulting progeny having constitutive expression of the desired phenotypic characteristic identified. Two or more generations may be grown to ensure that expression of the desired phenotypic characteristic is stably maintained and inherited and then seeds harvested to ensure expression of the desired phenotypic characteristic has been achieved. In this manner, the embodiments provides transformed seed (also referred to as “transgenic seed”) having a nucleotide construct of the embodiments, for example, an expression cassette of the embodiments, stably incorporated into their genome.

[0274] These embodiments may be used to confer or enhance fungal plant pathogen resistance or protect from fungal pathogen attack in plants, especially corn (Zea mays). Different parts of the plant may be protected from attack by pathogens, with the parts including and not limited to stalks, ears, leaves, roots and tassels. Other plant species may also be of interest in practicing the embodiments of the disclosure, including, and not limited to, other monocot crop plants.

[0275] Where appropriate, the polynucleotides may be optimized for increased expression in the transformed organism. For example, the polynucleotides can be synthesized using plant-preferred codons for improved expression. Methods are available in the art for synthesizing plant-preferred genes. See, for example, U.S. Pat. Nos. 5,380,831, and 5,436,391, and Murray et al., Nucleic Acids Res., 1989, 17:477-498, herein incorporated by reference.

[0276] The embodiments described herein may be effective against a variety of plant pathogens, particularly fungal pathogens, such as, for example Colletotrichum graminicola Ces. Wils. (Cg), Fusarium verticilliodes, and related species. The embodiments of the present disclosure may also be effective against maize stalk rot, including anthracnose stalk rot, wherein the causative agent is Colletotrichum graminicola Ces. Wils., Fusarium verticilliodes, and related species. In some embodiments, the stalk rot is Fusarium stalk rot.

[0277] Hence, the methods of the embodiments can be utilized to protect plants from disease, particularly those diseases that are caused by plant fungal pathogens. Fungal resistance can provide for enhanced resistance or tolerance to a fungal pathogen when compared to that of a wild type plant. Effects may vary from a slight increase in tolerance to the effects of the fungal pathogen (e.g., partial inhibition) to total resistance such that the plant is unaffected by the presence of the fungal pathogen. An increased level of resistance against a particular fungal pathogen or against a wider spectrum of fungal pathogens constitutes “enhanced” or improved fungal resistance. The embodiments of the disclosure also will enhance or improve fungal plant pathogen resistance, such that the resistance of the plant to a fungal pathogen or pathogens will increase. The term “enhance” refers to improve, increase, amplify, multiply, elevate, raise, and the like. Herein, plants of the disclosure are described as being resistant to infection by fungi such as Colletotrichum graminicola Ces. Wils., Fusarium verticilliodes, and related species or having ‘enhanced resistance’ to infection by Colletotrichum graminicola Ces. Wils., Fusarium verticilliodes, and related species as a result of the loci at chromosomes 4 and 6 conferring the resistance to plant, as described herein. Resistance may be provided by only a locus at chromosome 4. Resistance may be provided by only a locus at chromosome 6. Resistance may be provided by a locus at chromosome 4 and a locus at chromosome 6 together.

### Methods of Identifying and Selecting Maize Plants Displaying Resistance to Stalk Rot

[0278] In one aspect is provided a process of identifying a maize plant that displays enhanced resistance to anthracnose stalk rot, the process comprising detecting in the maize plant
[0279] a. the presence of at least two markers at a resistance locus on chromosome 6 comprising a “G” at C16759-001-K1 and one of the following single nucleotide polymorphisms:
   [0280] a “C” at C12305-001-K1,
   [0281] a “C” at C12307-001-K1,
   [0282] a “G” at C16760-001-K1,
   [0283] an “A” at C12314-001-K1; and/or
[0284] b. the presence of at least one marker at a resistance locus on chromosome 6 comprising at least one of the variant nucleotide polymorphisms recited in Table 13, and/or
[0285] c. the presence of at least one marker at a resistance locus on chromosome 4, wherein the resistance locus comprises a Rcg1 resistance allele having a haplotype comprising one or more single nucleotide polymorphism selected from the group consisting of:
   [0286] a “C” at position 413 referenced to SEQ ID NO: 50,
   [0287] a “C” at position 958 referenced to SEQ ID NO: 50,
   [0288] a “C” at position 971 referenced to SEQ ID NO: 50,
   [0289] a “T” at position 1099 referenced to SEQ ID NO: 50,
   [0290] an “A” at position 1154 referenced to SEQ ID NO: 50,
   [0291] a “T” at position 1250 referenced to SEQ ID NO: 50,
   [0292] a “G” at position 1607 referenced to SEQ ID NO: 50,
   [0293] a “G” at position 2001 referenced to SEQ ID NO: 50,
   [0294] an “A” at position 2598 referenced to SEQ ID NO: 50, and
   [0295] an “A” at position 3342 referenced to SEQ ID NO: 50,
      where the at least two markers of (a) and/or the at least one marker of (b) are closely linked to and associated with the resistance locus on chromosome 6 and the at least one marker of (c) is closely linked to and associated with the resistance locus on chromosome 4.

[0296] In various embodiments, the resistance locus on chromosome 6 is located on a chromosomal interval between makers PZE-106066805 and PZE-106075546. In various embodiments, the resistance locus on chromosome 4 is located on a chromosomal interval between makers PZE-104102206 and PZE-104132759. In various embodiments, the resistance locus on chromosome 6 is located on a chromosomal interval between 139646631 and 139889078 numbered according to the B73AGPv05 genome sequence. In various embodiments, the resistance locus of chromosome 6 comprises SEQ ID NO: 272, or a fragment thereof. In various embodiments, the resistance locus on chromosome 6 comprising one or more nucleotide sequences is selected from the group consisting of
[0297] i. a nucleotide sequence of SEQ ID NO: 209, 212, 215, 218, 221, 224, 227, 230, 233, 236, 239, 242, 245, 248, 251, 254, 257, 260, 263, 266 or 269, preferably of SEQ ID NO: 266 or 269,
[0298] ii. a nucleotide sequence having a coding sequence of 210, 213, 216, 219, 222, 225, 228, 231, 234, 237, 240, 243, 246, 249, 252, 255, 258, 261, 264, 267 or 270, preferably of SEQ ID NO: 267 or 270,
[0299] iii. a nucleotide sequence which is complementary to a sequence from i. or ii.,
[0300] iv. a nucleotide sequence which has at least 80% or 85%, preferably at least 90%, 91%, 92%, 93%, 94% or 95%, more preferably at least 96%, 97%, 98% or 99% identity with a sequence from i., ii. or iii.,
[0301] v. a nucleotide sequence which differs from a nucleic acid sequence according to i., ii. or iii. depending on the degeneracy of the genetic code,
[0302] vi. a nucleotide sequence which hybridizes with a nucleic acid sequence according to i., ii. or iii. under stringent conditions,
[0303] vii. a nucleotide sequence which encodes for a protein comprising the sequence of SEQ ID NO: 211, 214, 217, 220, 223, 226, 229, 232, 235, 238, 241, 244, 247, 250, 253, 256, 259, 262, 265, 268 or 271, preferably the sequence of SEQ ID NO: 268 or 271, or
[0304] viii. a nucleotide sequence which encodes for a protein which has at least 80% or 85%, preferably at least 90%, 91%, 92%, 93%, 94% or 95%, more preferably at least 960%, 97%, 98% or 99% identity with the sequence of SEQ ID NOs: 211, 214, 217, 220, 223, 226, 229, 232, 235, 238, 241, 244, 247, 250, 253, 256, 259, 262, 265, 268 or 271, preferably with the sequence of SEQ ID NO: 268 or 271.

[0305] In various embodiments, the resistance locus on chromosome 6 comprising one or more nucleotide sequences is selected from the group consisting of
[0306] i. a nucleotide sequence of SEQ ID NO: 1, 20, 23, 44 or 47,
[0307] ii. a nucleotide sequence which is complementary to a sequence from i.,
[0308] iii. a nucleotide sequence which has at least 80% or 85%, preferably at least 90%, 91%, 92%, 93%, 94% or 95%, more preferably at least 96%, 97%, 98% or 99% identity with a sequence from i. or ii.,
[0309] iv. a nucleotide sequence which differs from a nucleic acid sequence according to i., ii. or iii. depending on the degeneracy of the genetic code,
[0310] v. a nucleotide sequence which hybridizes with a nucleic acid sequence according to i., ii. or iii. under stringent conditions,
[0311] vi. a nucleotide sequence which encodes for a protein comprising the sequence of SEQ ID NO: 11-19, 22, 34-43, 46 or 49, or
[0312] vii. a nucleotide sequence which encodes for a protein which has at least 80% or 85%, preferably at least 90%, 91%, 92%, 93%, 94% or 95%, more preferably at least 960%, 97%, 98% or 99% identity with the sequence of SEQ ID NOs: 11-19, 22, 34-43, 46 or 49.

[0313] In various embodiments, the resistance locus on chromosome 4 does not produce the amplicon according to SEQ ID NO: 119 (amplicon 7) upon polymerase chain reaction amplification by means of primers of SEQ ID NOs: 120 and 121, primers of SEQ ID NOs: 122 and 123, or primers of SEQ ID NOs: 124 and 125.

[0314] In various embodiments, the resistance locus on chromosome 4 does not produce an amplicon selected from the group consisting of SEQ ID NOs: 94, 101, 106, 109, and 114 (from each of amplicons 2-6, respectively) upon polymerase chain reaction amplification by means of primers of SEQ ID NOs: 95 and 96, primers of SEQ ID NOs: 97 and 98, primers of SEQ ID NOs: 99 and 100, primers of SEQ ID NOs: 101 and 102, primers of SEQ ID NOs: 103 and 104, primers of SEQ ID NOs: 105 and 106, primers of SEQ ID NOs: 107 and 108, primers of SEQ ID NOs: 109 and 110, primers of SEQ ID NOs: 111 and 112, primers of SEQ ID NOs: 113 and 114, primers of SEQ ID NOs: 115 and 116, or primers of SEQ ID NOs: 117 and 118.

[0315] In various embodiments, the resistance locus on chromosome 6 is derived from NC262A. In various embodiments, the resistance locus on chromosome 4 is derived from NC262A or NC342. In various embodiments, the process comprising detecting in the maize plant both (A) the presence or absence of at least one allele at the resistance locus on chromosome 6 as defined above under b. and (B) the presence or absence of at least one marker at the resistance locus on chromosome 4 as defined above under c.

[0316] In various embodiments, the at least one marker at the resistance locus on chromosome 6 detects a “G” at C16759-001-K1.

[0317] In various embodiments, the at least one marker at the resistance locus on chromosome 6 detects at least one of the variant nucleotide polymorphisms listed in Table 13. In various embodiments, the at least one marker at the resistance locus on chromosome 6 detects at least one of the variant nucleotide polymorphisms of the “A” at position 132836954 on chromosome 6, the “T” at position 132836944 on chromosome 6, an “A” at position 132836869 on chromosome 6, the “T” at position 132836849 on chromosome 6, the “T” at position 132836845 on chromosome 6, the “G” at position 132836840 on chromosome 6, the “T” at position 132836830 on chromosome 6, an “A” at position 132836810 on chromosome 6, the “CA” at position 132836805 on chromosome 6, the deletion of “ATC” at position 132836802 on chromosome 6, the deletion of “ATT” at position 132836799 on chromosome 6, an “A” at position 132836791 on chromosome 6, the “CTG” at position 132836787 on chromosome 6, the “GA” at position 132836781 on chromosome 6, the “T” at position 132836776 on chromosome 6, the “AG” at position 132836767 on chromosome 6, an “A” at position 132836762 on chromosome 6, the insertion of “CGCCAA” and an “A” at position 132836679 on chromosome 6, an “A” at position 132836678 on chromosome 6, the “G” at position 132836670 on chromosome 6, the “T” at position 132836667 on chromosome 6, an “A” at position 132836665 on chromosome 6, the “C” at position 132836662 on chromosome 6, the “T” at position 132836660 on chromosome 6, the “G” at position 132836651 on chromosome 6, the deletion of “AAT” at position 132836643 on chromosome 6, the deletion of “GCCATG” at position 132836636 on chromosome 6, the “AG” at position 132836622 on chromosome 6, the “AC” at position 132836620 on chromosome 6, the “G” at position 132836612 on chromosome 6, the “G” at position 132836603 on chromosome 6, the “C” at position 132836591 on chromosome 6, an “A” at position 132836586 on chromosome 6, the “G” at position 132836580 on chromosome 6, an “A” at position 132836069 on chromosome 6, an “A” at position 132836063 on chromosome 6, the “G” at position 132836061 on chromosome 6, the “G” at position 132836056 on chromosome 6, the “C” at position 132836050 on chromosome 6, the “CGT” at position 132836047 on chromosome 6, the “G” at position 132836034 on chromosome 6, the “G” at position 132836031 on chromosome 6, the “T” at position 132836019 on chromosome 6, the “G” at position 132836008 on chromosome 6, the “G” at position 132835978 on chromosome 6, the “G” at position 132835910 on chromosome 6, the “G” at position 132835851 on chromosome 6, the “C” at position 132835819 on chromosome 6, the “G” at position 132835803 on chromosome 6, the “T” at position 132835793 on chromosome 6, the “C” at position 132835788 on chromosome 6, an “A” at position 132835781 on chromosome 6, an “A” at position 132835779 on chromosome 6, the “T” at position 132835776 on chromosome 6, the “G” at position 132835746 on chromosome 6, an “A” at position 132835729 on chromosome 6, the “C” at position 132835728 on chromosome 6, the insertion of “GACATC” at position 132835722 on chromosome 6, the “T” at position 132835713 on chromosome 6, the deletion of “GAA” at position 132835708 on chromosome 6, the deletion of “ATA” at position 132835705 on chromosome 6, the deletion of “GAT” at position 132835702 on chromosome 6, the “G” at position 132835693 on chromosome 6, the “T” at position 132835681 on chromosome 6, the “C” at position 132835671 on chromosome 6, the “T” at position 132835666 on chromosome 6, an “A” at position 132835271 on chromosome 6, the “GG” at position 132835267 on chromosome 6, the “T” at position 132835147 on chromosome 6, the “C” at position 132835031 on chromosome 6, an “A” at position 132834960 on chromosome 6, an “A” at position 132834951 on chromosome 6, the “AC” at position 132834946 on chromosome 6, an “A” at position 132834942 on chromosome 6, an “A” at position 132834929 on chromosome 6, the “T” at position 132834927 on chromosome 6, an “A” at position 132834924 on chromosome 6, the “C” at position 132834919 on chromosome 6, the “T” at position 132834908 on chromosome 6, an “A” at position 132834899 on chromosome 6, the “C” at position 132834754 on chromosome 6, the “C” at position 132834753 on chromosome 6, the “C” at position 132834748 on chromosome 6, an “A” at position 132834721 on chromosome 6, an “A” at position 132834632 on chromosome 6, the “C” at position 132834622 on chromosome 6, the “G” at position 132834615 on chromosome 6, the “C” at position 132834602 on chromosome 6, the “G” at position 132834589 on chromosome 6, the “T” at position 132834581 on chromosome 6, an “A” at position 132834577 on chromosome 6, the “G” at position 132834569 on chromosome 6, the “C” at position 132834539 on chromosome 6, the “GAG” at position 132834532 on chromosome 6, the “T” at position 132834494 on chromosome 6, the “T” at position 132834431 on chromosome 6, the “G” at position 132834389 on chromosome 6, the “T” at position 132834208 on chromosome 6, the “T” at position 132831963 on chromosome 6, the “G” at position 132831924 on chromosome 6, an “A” at position 132831915 on chromosome 6, the “G” at position 132831839 on chromosome 6, the “T” at position 132829096 on chromosome 6, an “A” at position 132828997 on chromosome 6, the “G” at position 132828958 on chromosome 6, the “G” at position 132828950 on chromosome 6, the “C” at position 132828867 on chromosome 6, an “A” at position 132827606 on chromosome 6, the insertion of “AGTTCATAATAAAGTGATAGAGTT” (SEQ ID NO: 414) at position 132827596 on chromosome 6, the “T” at position 132827573 on chromosome 6, the “G” at position 132827566 on chromosome 6, an “A” at position 132827549 on chromosome 6, the “TAT” at position 132827545 on chromosome 6, the “C” at position 132827302 on chromosome 6, the “T” at position 132826983 on chromosome 6, the “T” at position 132826940 on chromosome 6, the “T” at position 1333040380 on chromosome 6, the “C” at position 1333040382 on chromosome 6, the “T” at position 133040760 on chromosome 6, compared to the position(s) on chromosome 6 of the B73AGPv04 reference genome sequence. In various embodiments, the at least one marker at the resistance locus on chromosome 6 are selected from the group consisting of SEQ ID NO: 273 to 407.

[0318] In various embodiments, the at least one marker at the resistance locus on chromosome 4 detects the nucleotide polymorphisms of the “C” at position 413 in SEQ ID NO: 50, the “C” at position 958 in SEQ ID NO: 50, the “C” at position 971 in SEQ ID NO: 50, the “T” at position 1099 in SEQ ID NO: 50, the “A” at position 1154 in SEQ ID NO: 50, the “T” at position 1250 in SEQ ID NO: 50, the “G” at position 1607 in SEQ ID NO: 50, the “G” at position 2001 in SEQ ID NO: 50, the “A” at position 2598 in SEQ ID NO: 50, or the “A” at position 3342 in SEQ ID NO: 50.

[0319] The presence or absence of at least one nucleotide polymorphism may be detected by polymerase chain reaction amplification of a nucleic acid present in the maize plant with a primer configured to specifically amplify a nucleic acid sequence comprising one or more of the single nucleotide polymorphisms described herein. The single nucleotide polymorphism may be a “C” at position 413 in SEQ ID NO: 50, and the primer may comprise the sequence GTACCATGTGACCA (SEQ ID NO: 406). An example of such primer is a primer comprising the sequence of SEQ ID NO: 58. The single nucleotide polymorphism may be a “T” at position 1099 in SEQ ID NO: 50, and the primer may comprise the sequence GTAGTGTTTTGAC (SEQ ID NO: 407). An example of such primer is a primer comprising the sequence of SEQ ID NO: 61. The single nucleotide polymorphism may be a “T” at position 1250 in SEQ ID NO: 50, and the primer may comprise the sequence TGATCTCAAAGAT (SEQ ID NO: 408). An example of such primer is a primer comprising the sequence of SEQ ID NO: 64. The single nucleotide polymorphism may be a “G” at position 1607 in SEQ ID NO: 50, and the primer may comprise the sequence GTTATGTGCACAA (SEQ ID NO: 409). An example of such primer is a primer comprising the sequence of SEQ ID NO: 67. The single nucleotide polymorphism may be a “G” at position 2001 in SEQ ID NO: 50, and the primer may comprise the sequence AGATGAAGGCTGT (SEQ ID NO: 410). An example of such primer is a primer comprising the sequence of SEQ ID NO: 70. The single nucleotide polymorphism may be an “A” at position 2598 in SEQ ID NO: 50, and the primer may comprise the sequence AAGTGACATGCAG (SEQ ID NO: 411). An example of such primer is a primer comprising the sequence of SEQ ID NO: 73. The single nucleotide polymorphism may be an “A” at position 3342 in SEQ ID NO: 50, and the primer may comprise the sequence CATCTGATGAAAGC (SEQ ID NO: 412). An example of such primer is a primer comprising the sequence of SEQ ID NO: 76.

[0320] In some embodiments, the presence or absence of the allele comprising a “G” at C16759-001-K1 is detected by polymerase chain reaction amplification of a nucleic acid present in the maize plant with a primer configured to specifically amplify a nucleic acid sequence of the allele. In some embodiments, the primer comprises the sequence AATTATGCTGATGA (SEQ ID NO: 413). An example of such primer is a primer comprising the sequence of SEQ ID NO: 85.

[0321] In another aspect is provided a process of selecting a maize plant with anthracnose stalk rot resistance, the process comprising identifying the maize plant according to any of the above-described processes, and selecting the maize plant as having anthracnose stalk rot resistance if the presence or absence of the at least one marker at the resistance locus on chromosome 6 and/or the at least one marker at the resistance locus on chromosome 4 is detected. A maize plant may be selected that comprises at least one additional marker allele that is closely linked to and associated with the nucleotide polymorphism(s). The additional marker allele may be linked to the nucleotide polymorphism by no more than 2 cM on a single meiosis based genetic map. The process may further comprise selecting the maize plant that comprises at least one additional marker allele that is linked to and associated with the allele comprising a “G” at C16759-001-K1. The additional marker allele may be linked to an allele comprising a “G” at C16759-001-K1 by no more than 2 cM on a single meiosis based genetic map. The additional marker allele may be linked to an allele comprising at least one of the variant nucleotide polymorphisms recited in Table 13.

[0322] In various embodiments, the process further comprises backcrossing the identified maize plant with another maize plant, preferably comprising backcrossing the resistance locus on chromosome 6 into a genotype which is not NC262A and/or the resistance locus on chromosome 4 into a genotype which is not NC262A or NC342.

[0323] In one aspect is provided a method of selecting a maize plant that displays resistance to anthracnose stalk rot. A first maize plant is obtained that comprises within its genome a haplotype comprising one or more polymorphism of
[0324] i. a “C” at position 413 referenced to SEQ ID NO: 50,
[0325] ii. a “C” at position 958 referenced to SEQ ID NO: 50,
[0326] iii. a “C” at position 971 referenced to SEQ ID NO: 50,
[0327] iv. a “T” at position 1099 referenced to SEQ ID NO: 50,
[0328] v. an “A” at position 1154 referenced to SEQ ID NO: 50,
[0329] vi. a “T” at position 1250 referenced to SEQ ID NO: 50,
[0330] vii. a “G” at position 1607 referenced to SEQ ID NO: 50,
[0331] viii. a “G” at position 2001 referenced to SEQ ID NO: 50,
[0332] ix. an “A” at position 2598 referenced to SEQ ID NO: 50,
[0333] x. an “A” at position 3342 referenced to SEQ ID NO: 50, and/or
[0334] xi. a “G” at C16759-001-K1; and/or
[0335] xii. an “A” at position 132836954 on chromosome 6 referenced to B73AGPv04, preferably detectable by marker sequence of SEQ ID NO: 273,
[0336] xiii. a “T” at position 132836944 on chromosome 6 referenced to B73AGPv04, preferably detectable by marker sequence of SEQ ID NO: 274,
[0337] xiv. an “A” at position 132836869 on chromosome 6 referenced to B73AGPv04, preferably detectable by marker sequence of SEQ ID NO: 275,
[0338] xv. a “T” at position 132836849 on chromosome 6 referenced to B73AGPv04, preferably detectable by marker sequence of SEQ ID NO: 276,
[0339] xvi. a “T” at position 132836845 on chromosome 6 referenced to B73AGPv04, preferably detectable by marker sequence of SEQ ID NO: 277,
[0340] xvii. a “G” at position 132836840 on chromosome 6 referenced to B73AGPv04, preferably detectable by marker sequence of SEQ ID NO: 278,
[0341] xviii. a “T” at position 132836830 on chromosome 6 referenced to B73AGPv04, preferably detectable by marker sequence of SEQ ID NO: 279,
[0342] xix. an “A” at position 132836810 on chromosome 6 referenced to B73AGPv04, preferably detectable by marker sequence of SEQ ID NO: 280,
[0343] xx. a “CA” at position 132836805 on chromosome 6 referenced to B73AGPv04, preferably detectable by marker sequence of SEQ ID NO: 281 and/or 282,
[0344] xxi. a deletion of “ATC” at position 132836802 on chromosome 6 referenced to B73AGPv04, preferably detectable by marker sequence of SEQ ID NO: 283 and/or 284,
[0345] xxii. a deletion of “ATT” at position 132836799 on chromosome 6 referenced to B73AGPv04, preferably detectable by marker sequence of SEQ ID NO: 283 and/or 284,
[0346] xxiii. an “A” at position 132836791 on chromosome 6 referenced to B73AGPv04, preferably detectable by marker sequence of SEQ ID NO: 285,
[0347] xxiv. a “CTG” at position 132836787 on chromosome 6 referenced to B73AGPv04, preferably detectable by marker sequence of SEQ ID NO: 286 and/or 287,
[0348] xxv. a “GA” at position 132836781 on chromosome 6 referenced to B73AGPv04, preferably detectable by marker sequence of SEQ ID NO: 288 and/or 289,
[0349] xxvi. a “T” at position 132836776 on chromosome 6 referenced to B73AGPv04, preferably detectable by marker sequence of SEQ ID NO: 290,
[0350] xxvii. a “AG” at position 132836767 on chromosome 6 referenced to B73AGPv04, preferably detectable by marker sequence of SEQ ID NO: 291 and/or 292,
[0351] xxviii. an “A” at position 132836762 on chromosome 6 referenced to B73AGPv04, preferably detectable by marker sequence of SEQ ID NO: 293,
[0352] xxix. an insertion of “CGCCAA” and an “A” at position 132836679 on chromosome 6 referenced to B73AGPv04, preferably detectable by marker sequence of SEQ ID NO: 294 and/or 295,
[0353] xxx. an “A” at position 132836678 on chromosome 6 referenced to B73AGPv04, preferably detectable by marker sequence of SEQ ID NO: 296,
[0354] xxxi. a “G” at position 132836670 on chromosome 6 referenced to B73AGPv04, preferably detectable by marker sequence of SEQ ID NO: 297,
[0355] xxxii. a “T” at position 132836667 on chromosome 6 referenced to B73AGPv04, preferably detectable by marker sequence of SEQ ID NO: 298,
[0356] xxxiii. an “A” at position 132836665 on chromosome 6 referenced to B73AGPv04, preferably detectable by marker sequence of SEQ ID NO: 299,
[0357] xxxiv. a “C” at position 132836662 on chromosome 6 referenced to B73AGPv04, preferably detectable by marker sequence of SEQ ID NO: 300,
[0358] xxxv. a “T” at position 132836660 on chromosome 6 referenced to B73AGPv04, preferably detectable by marker sequence of SEQ ID NO: 301,
[0359] xxxvi. a “G” at position 132836651 on chromosome 6 referenced to B73AGPv04, preferably detectable by marker sequence of SEQ ID NO: 302,
[0360] xxxvii. a deletion of “AAT” at position 132836643 on chromosome 6 referenced to B73AGPv04, preferably detectable by marker sequence of SEQ ID NO: 303 and/or 304,
[0361] xxxviii. a deletion of “GCCATG” at position 132836636 on chromosome 6 referenced to B73AGPv04, preferably detectable by marker sequence of SEQ ID NO: 305 and/or 306,
[0362] xxxix. a “AG” at position 132836622 on chromosome 6 referenced to B73AGPv04, preferably detectable by marker sequence of SEQ ID NO: 307 and/or 308,
[0363] xl. a “AC” at position 132836620 on chromosome 6 referenced to B73AGPv04, preferably detectable by marker sequence of SEQ ID NO: 309 and/or 310,
[0364] xli. a “G” at position 132836612 on chromosome 6 referenced to B73AGPv04, preferably detectable by marker sequence of SEQ ID NO: 311,
[0365] xlii. a “G” at position 132836603 on chromosome 6 referenced to B73AGPv04, preferably detectable by marker sequence of SEQ ID NO: 312,
[0366] xliii. a “C” at position 132836591 on chromosome 6 referenced to B73AGPv04, preferably detectable by marker sequence of SEQ ID NO: 313,
[0367] xliv. an “A” at position 132836586 on chromosome 6 referenced to B73AGPv04, preferably detectable by marker sequence of SEQ ID NO: 314,
[0368] xlv. a “G” at position 132836580 on chromosome 6 referenced to B73AGPv04, preferably detectable by marker sequence of SEQ ID NO: 315,
[0369] xlvi. an “A” at position 132836069 on chromosome 6 referenced to B73AGPv04, preferably detectable by marker sequence of SEQ ID NO: 316,
[0370] xlvii. an “A” at position 132836063 on chromosome 6 referenced to B73AGPv04, preferably detectable by marker sequence of SEQ ID NO: 317,
[0371] xlviii. a “G” at position 132836061 on chromosome 6 referenced to B73AGPv04, preferably detectable by marker sequence of SEQ ID NO: 318,
[0372] xlix. a “G” at position 132836056 on chromosome 6 referenced to B73AGPv04, preferably detectable by marker sequence of SEQ ID NO: 319,
[0373] l. a “C” at position 132836050 on chromosome 6 referenced to B73AGPv04, preferably detectable by marker sequence of SEQ ID NO: 320,
[0374] li. a “CGT” at position 132836047 on chromosome 6 referenced to B73AGPv04, preferably detectable by marker sequence of SEQ ID NO: 321 and/or 322,
[0375] lii. a “G” at position 132836034 on chromosome 6 referenced to B73AGPv04, preferably detectable by marker sequence of SEQ ID NO: 323,
[0376] liii. a “G” at position 132836031 on chromosome 6 referenced to B73AGPv04, preferably detectable by marker sequence of SEQ ID NO: 324,
[0377] liv. a “T” at position 132836019 on chromosome 6 referenced to B73AGPv04, preferably detectable by marker sequence of SEQ ID NO: 325,
[0378] lv. a “G” at position 132836008 on chromosome 6 referenced to B73AGPv04, preferably detectable by marker sequence of SEQ ID NO: 326,
[0379] lvi. a “G” at position 132835978 on chromosome 6 referenced to B73AGPv04, preferably detectable by marker sequence of SEQ ID NO: 327,
[0380] lvii. a “G” at position 132835910 on chromosome 6 referenced to B73AGPv04, preferably detectable by marker sequence of SEQ ID NO: 328,
[0381] lviii. a “G” at position 132835851 on chromosome 6 referenced to B73AGPv04, preferably detectable by marker sequence of SEQ ID NO: 329,
[0382] lix. a “C” at position 132835819 on chromosome 6 referenced to B73AGPv04, preferably detectable by marker sequence of SEQ ID NO: 330,
[0383] lx. a “G” at position 132835803 on chromosome 6 referenced to B73AGPv04, preferably detectable by marker sequence of SEQ ID NO: 331,
[0384] lxi. a “T” at position 132835793 on chromosome 6 referenced to B73AGPv04, preferably detectable by marker sequence of SEQ ID NO: 332,
[0385] lxii. a “C” at position 132835788 on chromosome 6 referenced to B73AGPv04, preferably detectable by marker sequence of SEQ ID NO: 333,
[0386] lxiii. an “A” at position 132835781 on chromosome 6 referenced to B73AGPv04, preferably detectable by marker sequence of SEQ ID NO: 334,
[0387] lxiv. an “A” at position 132835779 on chromosome 6 referenced to B73AGPv04, preferably detectable by marker sequence of SEQ ID NO: 335,
[0388] lxv. a “T” at position 132835776 on chromosome 6 referenced to B73AGPv04, preferably detectable by marker sequence of SEQ ID NO: 336,
[0389] lxvi. a “G” at position 132835746 on chromosome 6 referenced to B73AGPv04, preferably detectable by marker sequence of SEQ ID NO: 337,
[0390] lxvii. an “A” at position 132835729 on chromosome 6 referenced to B73AGPv04, preferably detectable by marker sequence of SEQ ID NO: 338,
[0391] lxviii. a “C” at position 132835728 on chromosome 6 referenced to B73AGPv04, preferably detectable by marker sequence of SEQ ID NO: 339,
[0392] lxix. an insertion of “GACATC” at position 132835722 on chromosome 6 referenced to B73AGPv04, preferably detectable by marker sequence of SEQ ID NO: 340 and/or 341,
[0393] lxx. a “T” at position 132835713 on chromosome 6 referenced to B73AGPv04, preferably detectable by marker sequence of SEQ ID NO: 342,
[0394] lxxi. a deletion of “GAA” at position 132835708 on chromosome 6 referenced to B73AGPv04, preferably detectable by marker sequence of SEQ ID NO: 343 and/or 344,
[0395] lxxii. a deletion of “ATA” at position 132835705 on chromosome 6 referenced to B73AGPv04, preferably detectable by marker sequence of SEQ ID NO: 343 and/or 344,
[0396] lxxiii. a deletion of “GAT” at position 132835702 on chromosome 6 referenced to B73AGPv04, preferably detectable by marker sequence of SEQ ID NO: 343 and/or 344,
[0397] lxxiv. a “G” at position 132835693 on chromosome 6 referenced to B73AGPv04, preferably detectable by marker sequence of SEQ ID NO: 345,
[0398] lxxv. a “T” at position 132835681 on chromosome 6 referenced to B73AGPv04, preferably detectable by marker sequence of SEQ ID NO: 346,
[0399] lxxvi. a “C” at position 132835671 on chromosome 6 referenced to B73AGPv04, preferably detectable by marker sequence of SEQ ID NO: 347,
[0400] lxxvii. a “T” at position 132835666 on chromosome 6 referenced to B73AGPv04, preferably detectable by marker sequence of SEQ ID NO: 348,
[0401] lxxviii. an “A” at position 132835271 on chromosome 6 referenced to B73AGPv04, preferably detectable by marker sequence of SEQ ID NO: 349,
[0402] lxxix. a “GG” at position 132835267 on chromosome 6 referenced to B73AGPv04, preferably detectable by marker sequence of SEQ ID NO: 350 and/or 351,
[0403] lxxx. a “T” at position 132835147 on chromosome 6 referenced to B73AGPv04, preferably detectable by marker sequence of SEQ ID NO: 352,
[0404] lxxxi. a “C” at position 132835031 on chromosome 6 referenced to B73AGPv04, preferably detectable by marker sequence of SEQ ID NO: 353,
[0405] lxxxii. an “A” at position 132834960 on chromosome 6 referenced to B73AGPv04, preferably detectable by marker sequence of SEQ ID NO: 354,
[0406] lxxxiii. an “A” at position 132834951 on chromosome 6 referenced to B73AGPv04, preferably detectable by marker sequence of SEQ ID NO: 355,
[0407] lxxxiv. a “AC” at position 132834946 on chromosome 6 referenced to B73AGPv04, preferably detectable by marker sequence of SEQ ID NO: 356 and/or 357,
[0408] lxxxv. an “A” at position 132834942 on chromosome 6 referenced to B73AGPv04, preferably detectable by marker sequence of SEQ ID NO: 358,
[0409] lxxxvi. an “A” at position 132834929 on chromosome 6 referenced to B73AGPv04, preferably detectable by marker sequence of SEQ ID NO: 359,
[0410] lxxxvii. a “T” at position 132834927 on chromosome 6 referenced to B73AGPv04, preferably detectable by marker sequence of SEQ ID NO: 360,
[0411] lxxxviii. an “A” at position 132834924 on chromosome 6 referenced to B73AGPv04, preferably detectable by marker sequence of SEQ ID NO: 361,
[0412] lxxxix. a “C” at position 132834919 on chromosome 6 referenced to B73AGPv04, preferably detectable by marker sequence of SEQ ID NO: 362,
[0413] xc. a “T” at position 132834908 on chromosome 6 referenced to B73AGPv04, preferably detectable by marker sequence of SEQ ID NO: 363,
[0414] xci. an “A” at position 132834899 on chromosome 6 referenced to B73AGPv04, preferably detectable by marker sequence of SEQ ID NO: 364,
[0415] xcii. a “C” at position 132834754 on chromosome 6 referenced to B73AGPv04, preferably detectable by marker sequence of SEQ ID NO: 365,
[0416] xciii. a “C” at position 132834753 on chromosome 6 referenced to B73AGPv04, preferably detectable by marker sequence of SEQ ID NO: 366,
[0417] xciv. a “C” at position 132834748 on chromosome 6 referenced to B73AGPv04, preferably detectable by marker sequence of SEQ ID NO: 367,
[0418] xcv. an “A” at position 132834721 on chromosome 6 referenced to B73AGPv04, preferably detectable by marker sequence of SEQ ID NO: 368,
[0419] xcvi. an “A” at position 132834632 on chromosome 6 referenced to B73AGPv04, preferably detectable by marker sequence of SEQ ID NO: 369,
[0420] xcvii. a “C” at position 132834622 on chromosome 6 referenced to B73AGPv04, preferably detectable by marker sequence of SEQ ID NO: 370,
[0421] xcviii. a “G” at position 132834615 on chromosome 6 referenced to B73AGPv04, preferably detectable by marker sequence of SEQ ID NO: 371,
[0422] xcix. a “C” at position 132834602 on chromosome 6 referenced to B73AGPv04,
[0423] c. a “G” at position 132834589 on chromosome 6 referenced to B73AGPv04, preferably detectable by marker sequence of SEQ ID NO: 372,
[0424] ci. a “T” at position 132834581 on chromosome 6 referenced to B73AGPv04, preferably detectable by marker sequence of SEQ ID NO: 373,
[0425] cii. an “A” at position 132834577 on chromosome 6 referenced to B73AGPv04, preferably detectable by marker sequence of SEQ ID NO: 374,
[0426] ciii. a “G” at position 132834569 on chromosome 6 referenced to B73AGPv04, preferably detectable by marker sequence of SEQ ID NO: 375,
[0427] civ. a “C” at position 132834539 on chromosome 6 referenced to B73AGPv04, preferably detectable by marker sequence of SEQ ID NO: 376,
[0428] cv. a “GAG” at position 132834532 on chromosome 6 referenced to B73AGPv04, preferably detectable by marker sequence of SEQ ID NO: 377 and/or 378,
[0429] cvi. a “T” at position 132834494 on chromosome 6 referenced to B73AGPv04, preferably detectable by marker sequence of SEQ ID NO: 379,
[0430] cvii. a “T” at position 132834431 on chromosome 6 referenced to B73AGPv04, preferably detectable by marker sequence of SEQ ID NO: 380,
[0431] cviii. a “G” at position 132834389 on chromosome 6 referenced to B73AGPv04, preferably detectable by marker sequence of SEQ ID NO: 381,
[0432] cix. a “T” at position 132834208 on chromosome 6 referenced to B73AGPv04, preferably detectable by marker sequence of SEQ ID NO: 382,
[0433] cx. a “T” at position 132831963 on chromosome 6 referenced to B73AGPv04, preferably detectable by marker sequence of SEQ ID NO: 383,
[0434] cxi. a “G” at position 132831924 on chromosome 6 referenced to B73AGPv04, preferably detectable by marker sequence of SEQ ID NO: 384,
[0435] cxii. an “A” at position 132831915 on chromosome 6 referenced to B73AGPv04, preferably detectable by marker sequence of SEQ ID NO: 385,
[0436] cxiii. a “G” at position 132831839 on chromosome 6 referenced to B73AGPv04, preferably detectable by marker sequence of SEQ ID NO: 386,
[0437] cxiv. a “T” at position 132829096 on chromosome 6 referenced to B73AGPv04, preferably detectable by marker sequence of SEQ ID NO: 387,
[0438] cxv. an “A” at position 132828997 on chromosome 6 referenced to B73AGPv04, preferably detectable by marker sequence of SEQ ID NO: 388,
[0439] cxvi. a “G” at position 132828958 on chromosome 6 referenced to B73AGPv04, preferably detectable by marker sequence of SEQ ID NO: 389,
[0440] cxvii. a “G” at position 132828950 on chromosome 6 referenced to B73AGPv04, preferably detectable by marker sequence of SEQ ID NO: 390,
[0441] cxviii. a “C” at position 132828867 on chromosome 6 referenced to B73AGPv04, preferably detectable by marker sequence of SEQ ID NO: 391,
[0442] cxix. an “A” at position 132827606 on chromosome 6 referenced to B73AGPv04, preferably detectable by marker sequence of SEQ ID NO: 392,
[0443] cxx. an insertion of “AGTTCATAATAAAGTGATAGAGTT” (SEQ ID NO: 414) at position 132827596 on chromosome 6 referenced to B73AGPv04, preferably detectable by marker sequence of SEQ ID NO: 393 and/or 394,
[0444] cxxi. a “T” at position 132827573 on chromosome 6 referenced to B73AGPv04, preferably detectable by marker sequence of SEQ ID NO: 395,
[0445] cxxii. a “G” at position 132827566 on chromosome 6 referenced to B73AGPv04, preferably detectable by marker sequence of SEQ ID NO: 396,
[0446] cxxiii. an “A” at position 132827549 on chromosome 6 referenced to B73AGPv04, preferably detectable by marker sequence of SEQ ID NO: 397,
[0447] cxxiv. a “TAT” at position 132827545 on chromosome 6 referenced to B73AGPv04, preferably detectable by marker sequence of SEQ ID NO: 398 and/or 399,
[0448] cxxv. a “C” at position 132827302 on chromosome 6 referenced to B73AGPv04, preferably detectable by marker sequence of SEQ ID NO: 400,
[0449] cxxvi. a “T” at position 132826983 on chromosome 6 referenced to B73AGPv04, preferably detectable by marker sequence of SEQ ID NO: 401,
[0450] cxxvii. a “T” at position 132826940 on chromosome 6 referenced to B73AGPv04, preferably detectable by marker sequence of SEQ ID NO: 402,
[0451] cxxviii. a “T” at position 1333040380 on chromosome 6 referenced to B73AGPv04, preferably detectable by marker sequence of SEQ ID NO: 403,
[0452] cxxix. a “C” at position 1333040382 on chromosome 6 referenced to B73AGPv04, preferably detectable by marker sequence of SEQ ID NO: 404, or
[0453] cxxx. a “T” at position 133040760 on chromosome 6 referenced to B73AGPv04, preferably detectable by marker sequence of SEQ ID NO: 405.

[0454] The first maize plant is crossed to a second maize plant. Progeny plants are evaluated for the above haplotype or at least one marker allele linked to and associated with a haplotype in the first maize plant crossed with the second maize plant. Progeny plants are selected for that possess the haplotype in the first maize plant.

[0455] In some embodiments, the first maize plant is obtained and comprises within its genome a haplotype comprising a “G” at C16759-001-K1 and optionally one or more of a “C” at C12305-001-K1, a “C” at C12307-001-K1, a “G” at C16760-001-K1 and an “A” at C12314-001-K1, and/or a haplotype comprising variant nucleotide polymorphisms recited in Table 13 and/or a haplotype comprising one or more of
[0456] i. a “C” at position 413 referenced to SEQ ID NO: 50,
[0457] ii. a “C” at position 958 referenced to SEQ ID NO: 50,
[0458] iii. a “C” at position 971 referenced to SEQ ID NO: 50,
[0459] iv. a “T” at position 1099 referenced to SEQ ID NO: 50,
[0460] v. an “A” at position 1154 referenced to SEQ ID NO: 50,
[0461] vi. a “T” at position 1250 referenced to SEQ ID NO: 50,
[0462] vii. a “G” at position 1607 referenced to SEQ ID NO: 50,
[0463] viii. a “G” at position 2001 referenced to SEQ ID NO: 50,
[0464] ix. an “A” at position 2598 referenced to SEQ ID NO: 50, and
[0465] x. an “A” at position 3342 referenced to SEQ ID NO: 50.

[0466] Also provided is a maize plant selected according to any of the above methods.

Modification of Plants with Site-Directed Nucleases

[0467] The disclosure provides a method for manufacturing a maize plant having anthracnose stalk rot resistance, comprising:
[0468] (a) introducing or introgressing into at least one cell of a maize plant any of the nucleic acid molecules described herein, or any of the expression cassettes described herein; or
[0469] (b.1) introducing of a site-directed nuclease and a repair matrix into at least one cell of a maize plant, wherein the site-directed nuclease is able to generate at least one double-strand break of the DNA in the genome of the at least one cell and the repair matrix comprises a nucleic acid molecule and/or a nucleic acid sequence of interest described herein; and
[0470] (b.2) cultivation of the at least one cell of (b.1) under conditions that allow a homology-directed repair or a homologous recombination, wherein the nucleic acid molecule is integrated from the repair matrix into the genome of the maize plant; or
[0471] (c.1) introducing of a site-directed nuclease, wherein the site-directed nuclease is able to generate at least one single-strand break of the DNA in the genome of the at least one cell and optionally the repair matrix comprises a nucleic acid molecule and/or a nucleic acid sequence of interest described herein; and
[0472] (c.2) cultivation of the at least one cell of (c.1) under conditions that allow introduction of at least one single nucleotide polymorphism of the anthracnose stalk rot resistance conferring genes of the present disclosure described herein or that allow a homology-directed repair or a homologous recombination, wherein the nucleic acid molecule is integrated from the repair matrix into the genome of the maize plant; and
[0473] (d) obtaining the plant having anthracnose stalk rot resistance from the at least one cell.

[0474] In various embodiments, the site-specific nuclease comprises a zinc-finger nuclease, a transcription activator-like effector nuclease, a CRISPR/Cas system, including a CRISPR/Cas9 system, a CRISPR/Cpf1 system, a CRISPR/MAD7, a CRISPR/CasX system, a CRISPR/CasY system, a Prime Editing system, a CRISPR-based base editor system, an engineered homing endonuclease, and a meganuclease, and/or any combination, variant, or catalytically active fragment thereof. The site-specific nuclease as used herein may include also mutant variants having nickase activity like nCas9 and/or non-functionality as nuclease like dCas9.

[0475] A CRISPR system, e.g., CRISPR/Cas, CRISPR/Cas9, CRISPR/Cpf1, a CRISPR/MAD7, CRISPR/CasX, or CRISPR/CasY, in its natural environment describes a molecular complex comprising at least one small and individual non-coding RNA in combination with a Cas nuclease or another CRISPR nuclease like a Cpf1 nuclease which can produce a specific DNA double-stranded break. Presently, CRISPR systems are categorized into 2 classes comprising five types of CRISPR systems, the type II system, for instance, using Cas9 as effector and the type V system using Cpf1 as effector molecule. In artificial CRISPR systems, a synthetic non-coding RNA and a CRISPR nuclease and/or optionally a modified CRISPR nuclease, modified to act as nickase or lacking any nuclease function, can be used in combination with at least one synthetic or artificial guide RNA or gRNA combining the function of a crRNA and/or a tracrRNA (Makarova et al., 2015, supra). The immune response mediated by CRISPR/Cas in natural systems requires CRISPR-RNA (crRNA), wherein the maturation of this guiding RNA, which controls the specific activation of the CRISPR nuclease, varies significantly between the various CRISPR systems which have been characterized so far. Firstly, the invading DNA, also known as a spacer, is integrated between two adjacent repeat regions at the proximal end of the CRISPR locus. Type II CRISPR systems, for example, can code for a Cas9 nuclease as key enzyme for the interference step, which system contains both a crRNA and also a trans-activating RNA (tracrRNA) as the guide motif. These hybridize and form double-stranded (ds) RNA regions which are recognized by RNAseIII and can be cleaved in order to form mature crRNAs. These then in turn associate with the Cas molecule in order to direct the nuclease specifically to the target nucleic acid region. Recombinant gRNA molecules can comprise both the variable DNA recognition region and also the Cas interaction region and thus can be specifically designed, independently of the specific target nucleic acid and the desired Cas nuclease. As a further safety mechanism, PAMs (protospacer adjacent motifs) must be present in the target nucleic acid region; these are DNA sequences which follow on directly from the Cas9/RNA complex-recognized DNA. The PAM sequence for the Cas9 from Streptococcus pyogenes has been described to be “NGG” or “NAG” (Standard IUPAC nucleotide code) (Jinek et al, “A programmable dual-RNA-guided DNA endonuclease in adaptive bacterial immunity”, Science 2012, 337: 816-821, incorporated by reference herein in its entirety. The PAM sequence for Cas9 from Staphylococcus aureus is “NNGRRT” or “NNGRR(N)”. Further variant CRISPR/Cas9 systems are known. Thus, a Neisseria meningitidis Cas9 cleaves at the PAM sequence NNNNGATT. A Streptococcus thermophilus Cas9 cleaves at the PAM sequence NNAGAAW. Recently, a further PAM motif NNNNRYAC has been described for a CRISPR system of Campylobacter (International Patent Publication No. WO 2016/021973 A1, incorporated by reference herein in its entirety). For Cpf1 nucleases, the Cpf1-crRNA complex, without a tracrRNA, efficiently recognize and cleave target DNA proceeded by a short T-rich PAM in contrast to the commonly G-rich PAMs recognized by Cas9 systems. Furthermore, by using modified CRISPR polypeptides, specific single-stranded breaks can be obtained. The combined use of Cas nickases with various recombinant gRNAs can also induce highly specific DNA double-stranded breaks by means of double DNA nicking. By using two gRNAs, moreover, the specificity of the DNA binding and thus the DNA cleavage can be optimized. Further CRISPR effectors like CasX and CasY effectors originally described for bacteria, are meanwhile available and represent further effectors, which can be used for genome engineering purposes (Burstein et al., “New CRISPR-Cas systems from uncultivated microbes”, Nature, 2017, 542, 237-241, incorporated by reference herein in its entirety).

[0476] Presently, for example, Type II systems relying on Cas9, or a variant or any chimeric form thereof, as endonuclease have been modified for genome engineering. Synthetic CRISPR systems consisting of two components, a guide RNA (gRNA) also called single guide RNA (sgRNA) and a non-specific CRISPR-associated endonuclease can be used to generate knock-out cells or animals by co-expressing a gRNA specific to the gene to be targeted and capable of association with the endonuclease Cas9. Notably, the gRNA is an artificial molecule comprising one domain interacting with the Cas or any other CRISPR effector protein or a variant or catalytically active fragment thereof and another domain interacting with the target nucleic acid of interest and thus representing a synthetic fusion of crRNA and tracrRNA (as “single guide RNA” (sgRNA) or simply “gRNA”). The genomic target can be any ˜20 nucleotide DNA sequence, provided that the target is present immediately upstream of a PAM sequence. The PAM sequence is of outstanding importance for target binding and the exact sequence is dependent upon the species of Cas9 and, for example, reads 5′-NGG-3′ or 5′ NAG 3′ (Standard IUPAC nucleotide code) (Jinek et al., Science 2012, supra) for a Streptococcus pyogenes derived Cas9. The PAM sequence for Cas9 from Staphylococcus aureus is NNGRRT or NNGRR(N). Many further variant CRISPR/Cas9 systems are known, including inter alia, Neisseria meningitidis Cas9 cleaving the PAM sequence NNNNGATT. A Streptococcus thermophilus Cas9 cleaving the PAM sequence NNAGAAW. Using modified Cas nucleases, targeted single-strand breaks can be introduced into a target sequence of interest. By the combined use of such a Cas nickase with different recombinant gRNAs highly site specific DNA double-strand breaks can be introduced using a double nicking system. Using one or more gRNAs can further increase the overall specificity and reduce off-target effects.

[0477] Once expressed, the Cas9 protein and the gRNA form a ribonucleoprotein complex through interactions between the gRNA “scaffold” domain and surface-exposed positively-charged grooves on Cas9. Cas9 undergoes a conformational change upon gRNA binding that shifts the molecule from an inactive, non-DNA binding conformation, into an active DNA-binding conformation. Importantly, the “spacer” sequence of the gRNA remains free to interact with target DNA. The Cas9-gRNA complex will bind any genomic sequence with a PAM, but the extent to which the gRNA spacer matches the target DNA determines whether Cas9 will cut. Once the Cas9-gRNA complex binds a putative DNA target, a “seed” sequence at the 3′ end of the gRNA targeting sequence begins to anneal to the target DNA. If the seed and target DNA sequences match, the gRNA will continue to anneal to the target DNA in a 3′ to 5′ direction (relative to the polarity of the gRNA).

[0478] CRISPR/Cas, e.g. CRISPR/Cas9, and likewise CRISPR/Cpf1 or CRISPR/CasX or CRISPR/CasY and other CRISPR systems are highly specific when gRNAs are designed correctly, but especially specificity is still a major concern, particularly for clinical uses or targeted plant GE based on the CRISPR technology. The specificity of the CRISPR system is determined in large part by how specific the gRNA targeting sequence is for the genomic target compared to the rest of the genome. Therefore, the methods according to the present disclosure when combined with the use of at least one CRISPR nuclease as site-specific nuclease and further combined with the use of a suitable CRISPR nucleic acid can provide a significantly more predictable outcome of GE. Whereas the CRISPR complex can mediate a highly precise cut of a genome or genetic material of a cell or cellular system at a specific site, the methods presented herein provide an additional control mechanism guaranteeing a programmable and predictable repair mechanism.

[0479] Covalent and non-covalent association or attachment can also apply for CRISPR nucleic acids sequences, which may comprise more than one portion, for example, a crRNA and a tracrRNA portion, which may be associated with each other as detailed above. In one embodiment, a repair template (repair matrix) nucleic acid sequence may be placed within a CRISPR nucleic acid sequence of interest to form a hybrid nucleic acid sequence according to the present disclosure, which hybrid may be formed by covalent and non-covalent association.

[0480] In various embodiments, the site-specific nuclease comprises a transcription activator-like effectors nuclease (TALEN). A TALEN can comprise a transcription activator-like effector (TALEs) from the bacterial genus Xanthomonas fused to a catalytic domain of a nuclease (e.g., FokI or a variant thereof). The DNA binding specificity of the TALE can be defined by repeat-variable di-residues (RVDs) of tandem-arranged 34/35-amino acid repeat units, such that one RVD specifically recognizes one nucleotide in the target DNA. The repeat units can be assembled to recognize basically any target sequences and fused to a catalytic domain of a nuclease create sequence specific endonucleases (see, e.g., Boch et al. (2009). Breaking the code of DNA binding specificity of TAL-type III effectors. Science, 326(5959), 1509-1512; Moscou & Bogdanove (2009). A simple cipher governs DNA recognition by TAL effectors. Science, 326(5959), 1501-1501; and WO 2010/079430, WO 2011/072246, WO 2011/154393, WO 2011/146121, WO 2012/001527, WO 2012/093833, WO 2012/104729, WO 2012/138927, WO 2012/138939). WO 2012/138927 further describes monomeric (compact) TALENs and TALEs with various catalytic domains and combinations thereof.

[0481] The nucleic acid molecule to be introduced into the maize plant may comprise a homology sequence. The homology sequence may be physically associated with the at least one nucleic acid sequence of interest within the nucleic acid molecule. As such, the homology sequence may be part of the at least one nucleic acid sequence of interest to be introduced. The homology sequence may be positioned within the 5′ and/or 3′ position of the at least one nucleic acid sequence of interest.

[0482] The homology sequence may comprise a sequence that has at least 85%-100% complementarity to one or more nucleic acid sequence(s) adjacent to the predetermined location on the genome to which the sequence is to be introduced, upstream and/or downstream from the predetermined location, over the entire length of the respective adjacent region(s). For high precision more than 95% homology/complementarity can be used to achieve a highly targeted repair event. As shown in Rubnitz et al., Mol. Cell Biol., 1984, 4(11), 2253-2258, also very low sequence homology might suffice to obtain a homologous recombination. As it is known to the skilled person, the degree of complementarity will depend on the genetic material to be modified, the nature of the planned edit, the complexity and size of a genome, the number of potential off-target sites, the genetic background and the environment within a cell or cellular system to be modified. In certain embodiments, the homology sequence comprises at least one spacer nucleotide. Alternatively, the spacer nucleotide can be present within the at least one nucleic acid sequence of interest to be introduced.

[0483] Without wishing to be bound by any theory, the homology sequence(s) can serve as templates to mediate homology-directed repair by having complementarity to at least one region, the upstream and/or the downstream region, adjacent to the predetermined location within the genetic material of the cellular system to be modified. The at least one nucleic acid sequence of interest and the flanking one or more homology region(s) thus can have the function of a repair template (RT) nucleic acid sequence. In certain embodiments, the RT may be further associated with another DNA and/or RNA sequence as mediated by complementary base pairing. In an alternative embodiment the RT may be associated with other sequence, for example, sequences of a vector, e.g., a plasmid vector, which vector can be used to amplify the RT prior to transformation.

[0484] Furthermore, the RT may also be physically associated with at least part of an amino acid component, preferably a site-specific nuclease. This configuration and association allows the availability of the RT in close physical proximity to the site of a double strand break (DSB), i.e., exactly at the position a targeted GE event is to be effected to allow even higher efficiency rates.

[0485] For example, the at least one RT may also be associated with at least one gRNA interacting with the at least one RT and further interacting with at least one portion of a CRISPR nuclease as site-specific nuclease.

[0486] A base editor enzyme or base editor or base editor system as used herein refers to a protein or a fragment thereof having the same catalytic activity as the protein it is derived from, which protein or fragment thereof, alone or when provided as molecular complex, referred to as base editing complex herein, has the capacity to mediate a targeted base modification, i.e., the conversion of a base of interest resulting in a point mutation of interest which in turn can result in a targeted mutation, if the base conversion does not cause a silent mutation, but rather a conversion of an amino acid encoded by the codon comprising the position to be converted with the base editor. Preferably, the at least one base editor according to the present disclosure is temporarily or permanently linked to at least one site-specific effector, or optionally to a component of at least one site-specific effector complex. The linkage can be covalent and/or non-covalent.

[0487] Any base editor or site-specific effector, or a catalytically active fragment thereof, or any component of a base editor complex or of a site-specific effector complex as disclosed herein can be introduced into a cell as a nucleic acid fragment, the nucleic acid fragment representing or encoding a DNA, RNA or protein effector, or it can be introduced as DNA, RNA and/or protein, or any combination thereof. The nucleic acid sequence of interest may comprise any sequence from an anthracnose stalk rot resistance allele sequence described herein. The nucleic acid sequence of interest to be introduced or integrated into the plant genome may comprise for instances the entirety of the nucleic acid sequence of SEQ ID NO: 272, or a portion of the nucleic acid sequence of SEQ ID NO: 272, wherein the nucleic acid sequence of interest comprises one or more of the following polymorphisms:
[0488] an “A” at position 132836954 on chromosome 6 referenced to B73AGPv04, preferably detectable by marker sequence of SEQ ID NO: 273,
[0489] a “T” at position 132836944 on chromosome 6 referenced to B73AGPv04, preferably detectable by marker sequence of SEQ ID NO: 274,
[0490] an “A” at position 132836869 on chromosome 6 referenced to B73AGPv04, preferably detectable by marker sequence of SEQ ID NO: 275,
[0491] a “T” at position 132836849 on chromosome 6 referenced to B73AGPv04, preferably detectable by marker sequence of SEQ ID NO: 276,
[0492] a “T” at position 132836845 on chromosome 6 referenced to B73AGPv04, preferably detectable by marker sequence of SEQ ID NO: 277,
[0493] a “G” at position 132836840 on chromosome 6 referenced to B73AGPv04, preferably detectable by marker sequence of SEQ ID NO: 278,
[0494] a “T” at position 132836830 on chromosome 6 referenced to B73AGPv04, preferably detectable by marker sequence of SEQ ID NO: 279,
[0495] an “A” at position 132836810 on chromosome 6 referenced to B73AGPv04, preferably detectable by marker sequence of SEQ ID NO: 280,
[0496] a “CA” at position 132836805 on chromosome 6 referenced to B73AGPv04, preferably detectable by marker sequence of SEQ ID NO: 281 and/or 282,
[0497] a deletion of “ATC” at position 132836802 on chromosome 6 referenced to B73AGPv04, preferably detectable by marker sequence of SEQ ID NO: 283 and/or 284,
[0498] a deletion of “ATT” at position 132836799 on chromosome 6 referenced to B73AGPv04, preferably detectable by marker sequence of SEQ ID NO: 283 and/or 284,
[0499] an “A” at position 132836791 on chromosome 6 referenced to B73AGPv04, preferably detectable by marker sequence of SEQ ID NO: 285,
[0500] a “CTG” at position 132836787 on chromosome 6 referenced to B73AGPv04, preferably detectable by marker sequence of SEQ ID NO: 286 and/or 287,
[0501] a “GA” at position 132836781 on chromosome 6 referenced to B73AGPv04, preferably detectable by marker sequence of SEQ ID NO: 288 and/or 289,
[0502] a “T” at position 132836776 on chromosome 6 referenced to B73AGPv04, preferably detectable by marker sequence of SEQ ID NO: 290,
[0503] a “AG” at position 132836767 on chromosome 6 referenced to B73AGPv04, preferably detectable by marker sequence of SEQ ID NO: 291 and/or 292,
[0504] an “A” at position 132836762 on chromosome 6 referenced to B73AGPv04, preferably detectable by marker sequence of SEQ ID NO: 293,
[0505] an insertion of “CGCCAA” and an “A” at position 132836679 on chromosome 6 referenced to B73AGPv04, preferably detectable by marker sequence of SEQ ID NO: 294 and/or 295,
[0506] an “A” at position 132836678 on chromosome 6 referenced to B73AGPv04, preferably detectable by marker sequence of SEQ ID NO: 296,
[0507] a “G” at position 132836670 on chromosome 6 referenced to B73AGPv04, preferably detectable by marker sequence of SEQ ID NO: 297,
[0508] a “T” at position 132836667 on chromosome 6 referenced to B73AGPv04, preferably detectable by marker sequence of SEQ ID NO: 298,
[0509] an “A” at position 132836665 on chromosome 6 referenced to B73AGPv04, preferably detectable by marker sequence of SEQ ID NO: 299,
[0510] a “C” at position 132836662 on chromosome 6 referenced to B73AGPv04, preferably detectable by marker sequence of SEQ ID NO: 300,
[0511] a “T” at position 132836660 on chromosome 6 referenced to B73AGPv04, preferably detectable by marker sequence of SEQ ID NO: 301,
[0512] a “G” at position 132836651 on chromosome 6 referenced to B73AGPv04, preferably detectable by marker sequence of SEQ ID NO: 302,
[0513] a deletion of “AAT” at position 132836643 on chromosome 6 referenced to B73AGPv04, preferably detectable by marker sequence of SEQ ID NO: 303 and/or 304,
[0514] a deletion of “GCCATG” at position 132836636 on chromosome 6 referenced to B73AGPv04, preferably detectable by marker sequence of SEQ ID NO: 305 and/or 306,
[0515] a “AG” at position 132836622 on chromosome 6 referenced to B73AGPv04, preferably detectable by marker sequence of SEQ ID NO: 307 and/or 308,
[0516] a “AC” at position 132836620 on chromosome 6 referenced to B73AGPv04, preferably detectable by marker sequence of SEQ ID NO: 309 and/or 310,
[0517] a “G” at position 132836612 on chromosome 6 referenced to B73AGPv04, preferably detectable by marker sequence of SEQ ID NO: 311,
[0518] a “G” at position 132836603 on chromosome 6 referenced to B73AGPv04, preferably detectable by marker sequence of SEQ ID NO: 312,
[0519] a “C” at position 132836591 on chromosome 6 referenced to B73AGPv04, preferably detectable by marker sequence of SEQ ID NO: 313,
[0520] an “A” at position 132836586 on chromosome 6 referenced to B73AGPv04, preferably detectable by marker sequence of SEQ ID NO: 314,
[0521] a “G” at position 132836580 on chromosome 6 referenced to B73AGPv04, preferably detectable by marker sequence of SEQ ID NO: 315,
[0522] an “A” at position 132836069 on chromosome 6 referenced to B73AGPv04, preferably detectable by marker sequence of SEQ ID NO: 316,
[0523] an “A” at position 132836063 on chromosome 6 referenced to B73AGPv04, preferably detectable by marker sequence of SEQ ID NO: 317,
[0524] a “G” at position 132836061 on chromosome 6 referenced to B73AGPv04, preferably detectable by marker sequence of SEQ ID NO: 318,
[0525] a “G” at position 132836056 on chromosome 6 referenced to B73AGPv04, preferably detectable by marker sequence of SEQ ID NO: 319,
[0526] a “C” at position 132836050 on chromosome 6 referenced to B73AGPv04, preferably detectable by marker sequence of SEQ ID NO: 320,
[0527] a “CGT” at position 132836047 on chromosome 6 referenced to B73AGPv04, preferably detectable by marker sequence of SEQ ID NO: 321 and/or 322,
[0528] a “G” at position 132836034 on chromosome 6 referenced to B73AGPv04, preferably detectable by marker sequence of SEQ ID NO: 323,
[0529] a “G” at position 132836031 on chromosome 6 referenced to B73AGPv04, preferably detectable by marker sequence of SEQ ID NO: 324,
[0530] a “T” at position 132836019 on chromosome 6 referenced to B73AGPv04, preferably detectable by marker sequence of SEQ ID NO: 325,
[0531] a “G” at position 132836008 on chromosome 6 referenced to B73AGPv04, preferably detectable by marker sequence of SEQ ID NO: 326,
[0532] a “G” at position 132835978 on chromosome 6 referenced to B73AGPv04, preferably detectable by marker sequence of SEQ ID NO: 327,
[0533] a “G” at position 132835910 on chromosome 6 referenced to B73AGPv04, preferably detectable by marker sequence of SEQ ID NO: 328,
[0534] a “G” at position 132835851 on chromosome 6 referenced to B73AGPv04, preferably detectable by marker sequence of SEQ ID NO: 329,
[0535] a “C” at position 132835819 on chromosome 6 referenced to B73AGPv04, preferably detectable by marker sequence of SEQ ID NO: 330,
[0536] a “G” at position 132835803 on chromosome 6 referenced to B73AGPv04, preferably detectable by marker sequence of SEQ ID NO: 331,
[0537] a “T” at position 132835793 on chromosome 6 referenced to B73AGPv04, preferably detectable by marker sequence of SEQ ID NO: 332,
[0538] a “C” at position 132835788 on chromosome 6 referenced to B73AGPv04, preferably detectable by marker sequence of SEQ ID NO: 333,
[0539] an “A” at position 132835781 on chromosome 6 referenced to B73AGPv04, preferably detectable by marker sequence of SEQ ID NO: 334,
[0540] an “A” at position 132835779 on chromosome 6 referenced to B73AGPv04, preferably detectable by marker sequence of SEQ ID NO: 335,
[0541] a “T” at position 132835776 on chromosome 6 referenced to B73AGPv04, preferably detectable by marker sequence of SEQ ID NO: 336,
[0542] a “G” at position 132835746 on chromosome 6 referenced to B73AGPv04, preferably detectable by marker sequence of SEQ ID NO: 337,
[0543] an “A” at position 132835729 on chromosome 6 referenced to B73AGPv04, preferably detectable by marker sequence of SEQ ID NO: 338,
[0544] a “C” at position 132835728 on chromosome 6 referenced to B73AGPv04, preferably detectable by marker sequence of SEQ ID NO: 339,
[0545] an insertion of “GACATC” at position 132835722 on chromosome 6 referenced to B73AGPv04, preferably detectable by marker sequence of SEQ ID NO: 340 and/or 341,
[0546] a “T” at position 132835713 on chromosome 6 referenced to B73AGPv04, preferably detectable by marker sequence of SEQ ID NO: 342,
[0547] a deletion of “GAA” at position 132835708 on chromosome 6 referenced to B73AGPv04, preferably detectable by marker sequence of SEQ ID NO: 343 and/or 344,
[0548] a deletion of “ATA” at position 132835705 on chromosome 6 referenced to B73AGPv04, preferably detectable by marker sequence of SEQ ID NO: 343 and/or 344,
[0549] a deletion of “GAT” at position 132835702 on chromosome 6 referenced to B73AGPv04, preferably detectable by marker sequence of SEQ ID NO: 343 and/or 344,
[0550] a “G” at position 132835693 on chromosome 6 referenced to B73AGPv04, preferably detectable by marker sequence of SEQ ID NO: 345,
[0551] a “T” at position 132835681 on chromosome 6 referenced to B73AGPv04, preferably detectable by marker sequence of SEQ ID NO: 346,
[0552] a “C” at position 132835671 on chromosome 6 referenced to B73AGPv04, preferably detectable by marker sequence of SEQ ID NO: 347,
[0553] a “T” at position 132835666 on chromosome 6 referenced to B73AGPv04, preferably detectable by marker sequence of SEQ ID NO: 348,
[0554] an “A” at position 132835271 on chromosome 6 referenced to B73AGPv04, preferably detectable by marker sequence of SEQ ID NO: 349,
[0555] a “GG” at position 132835267 on chromosome 6 referenced to B73AGPv04, preferably detectable by marker sequence of SEQ ID NO: 350 and/or 351,
[0556] a “T” at position 132835147 on chromosome 6 referenced to B73AGPv04, preferably detectable by marker sequence of SEQ ID NO: 352,
[0557] a “C” at position 132835031 on chromosome 6 referenced to B73AGPv04, preferably detectable by marker sequence of SEQ ID NO: 353,
[0558] an “A” at position 132834960 on chromosome 6 referenced to B73AGPv04, preferably detectable by marker sequence of SEQ ID NO: 354,
[0559] an “A” at position 132834951 on chromosome 6 referenced to B73AGPv04, preferably detectable by marker sequence of SEQ ID NO: 355,
[0560] a “AC” at position 132834946 on chromosome 6 referenced to B73AGPv04, preferably detectable by marker sequence of SEQ ID NO: 356 and/or 357,
[0561] an “A” at position 132834942 on chromosome 6 referenced to B73AGPv04, preferably detectable by marker sequence of SEQ ID NO: 358,
[0562] an “A” at position 132834929 on chromosome 6 referenced to B73AGPv04, preferably detectable by marker sequence of SEQ ID NO: 359,
[0563] a “T” at position 132834927 on chromosome 6 referenced to B73AGPv04, preferably detectable by marker sequence of SEQ ID NO: 360,
[0564] an “A” at position 132834924 on chromosome 6 referenced to B73AGPv04, preferably detectable by marker sequence of SEQ ID NO: 361,
[0565] a “C” at position 132834919 on chromosome 6 referenced to B73AGPv04, preferably detectable by marker sequence of SEQ ID NO: 362,
[0566] a “T” at position 132834908 on chromosome 6 referenced to B73AGPv04, preferably detectable by marker sequence of SEQ ID NO: 363,
[0567] an “A” at position 132834899 on chromosome 6 referenced to B73AGPv04, preferably detectable by marker sequence of SEQ ID NO: 364,
[0568] a “C” at position 132834754 on chromosome 6 referenced to B73AGPv04, preferably detectable by marker sequence of SEQ ID NO: 365,
[0569] a “C” at position 132834753 on chromosome 6 referenced to B73AGPv04, preferably detectable by marker sequence of SEQ ID NO: 366,
[0570] a “C” at position 132834748 on chromosome 6 referenced to B73AGPv04, preferably detectable by marker sequence of SEQ ID NO: 367,
[0571] an “A” at position 132834721 on chromosome 6 referenced to B73AGPv04, preferably detectable by marker sequence of SEQ ID NO: 368,
[0572] an “A” at position 132834632 on chromosome 6 referenced to B73AGPv04, preferably detectable by marker sequence of SEQ ID NO: 369,
[0573] a “C” at position 132834622 on chromosome 6 referenced to B73AGPv04, preferably detectable by marker sequence of SEQ ID NO: 370,
[0574] a “G” at position 132834615 on chromosome 6 referenced to B73AGPv04, preferably detectable by marker sequence of SEQ ID NO: 371,
[0575] a “C” at position 132834602 on chromosome 6 referenced to B73AGPv04,
[0576] a “G” at position 132834589 on chromosome 6 referenced to B73AGPv04, preferably detectable by marker sequence of SEQ ID NO: 372,
[0577] a “T” at position 132834581 on chromosome 6 referenced to B73AGPv04, preferably detectable by marker sequence of SEQ ID NO: 373,
[0578] an “A” at position 132834577 on chromosome 6 referenced to B73AGPv04, preferably detectable by marker sequence of SEQ ID NO: 374,
[0579] a “G” at position 132834569 on chromosome 6 referenced to B73AGPv04, preferably detectable by marker sequence of SEQ ID NO: 375,
[0580] a “C” at position 132834539 on chromosome 6 referenced to B73AGPv04, preferably detectable by marker sequence of SEQ ID NO: 376,
[0581] a “GAG” at position 132834532 on chromosome 6 referenced to B73AGPv04, preferably detectable by marker sequence of SEQ ID NO: 377 and/or 378,
[0582] a “T” at position 132834494 on chromosome 6 referenced to B73AGPv04, preferably detectable by marker sequence of SEQ ID NO: 379,
[0583] a “T” at position 132834431 on chromosome 6 referenced to B73AGPv04, preferably detectable by marker sequence of SEQ ID NO: 380,
[0584] a “G” at position 132834389 on chromosome 6 referenced to B73AGPv04, preferably detectable by marker sequence of SEQ ID NO: 381,
[0585] a “T” at position 132834208 on chromosome 6 referenced to B73AGPv04, preferably detectable by marker sequence of SEQ ID NO: 382,
[0586] a “T” at position 132831963 on chromosome 6 referenced to B73AGPv04, preferably detectable by marker sequence of SEQ ID NO: 383,
[0587] a “G” at position 132831924 on chromosome 6 referenced to B73AGPv04, preferably detectable by marker sequence of SEQ ID NO: 384,
[0588] an “A” at position 132831915 on chromosome 6 referenced to B73AGPv04, preferably detectable by marker sequence of SEQ ID NO: 385,
[0589] a “G” at position 132831839 on chromosome 6 referenced to B73AGPv04, preferably detectable by marker sequence of SEQ ID NO: 386,
[0590] a “T” at position 132829096 on chromosome 6 referenced to B73AGPv04, preferably detectable by marker sequence of SEQ ID NO: 387,
[0591] an “A” at position 132828997 on chromosome 6 referenced to B73AGPv04, preferably detectable by marker sequence of SEQ ID NO: 388,
[0592] a “G” at position 132828958 on chromosome 6 referenced to B73AGPv04, preferably detectable by marker sequence of SEQ ID NO: 389,
[0593] a “G” at position 132828950 on chromosome 6 referenced to B73AGPv04, preferably detectable by marker sequence of SEQ ID NO: 390,
[0594] a “C” at position 132828867 on chromosome 6 referenced to B73AGPv04, preferably detectable by marker sequence of SEQ ID NO: 391,
[0595] an “A” at position 132827606 on chromosome 6 referenced to B73AGPv04, preferably detectable by marker sequence of SEQ ID NO: 392,
[0596] an insertion of “AGTTCATAATAAAGTGATAGAGTT” (SEQ ID NO: 414) at position 132827596 on chromosome 6 referenced to B73AGPv04, preferably detectable by marker sequence of SEQ ID NO: 393 and/or 394,
[0597] a “T” at position 132827573 on chromosome 6 referenced to B73AGPv04, preferably detectable by marker sequence of SEQ ID NO: 395,
[0598] a “G” at position 132827566 on chromosome 6 referenced to B73AGPv04, preferably detectable by marker sequence of SEQ ID NO: 396,
[0599] an “A” at position 132827549 on chromosome 6 referenced to B73AGPv04, preferably detectable by marker sequence of SEQ ID NO: 397,
[0600] a “TAT” at position 132827545 on chromosome 6 referenced to B73AGPv04, preferably detectable by marker sequence of SEQ ID NO: 398 and/or 399,
[0601] a “C” at position 132827302 on chromosome 6 referenced to B73AGPv04, preferably detectable by marker sequence of SEQ ID NO: 400,
[0602] a “T” at position 132826983 on chromosome 6 referenced to B73AGPv04, preferably detectable by marker sequence of SEQ ID NO: 401,
[0603] a “T” at position 132826940 on chromosome 6 referenced to B73AGPv04, preferably detectable by marker sequence of SEQ ID NO: 402,
[0604] a “T” at position 1333040380 on chromosome 6 referenced to B73AGPv04, preferably detectable by marker sequence of SEQ ID NO: 403,
[0605] a “C” at position 1333040382 on chromosome 6 referenced to B73AGPv04, preferably detectable by marker sequence of SEQ ID NO: 404, or
[0606] a “T” at position 133040760 on chromosome 6 referenced to B73AGPv04, preferably detectable by marker sequence of SEQ ID NO: 405.

[0607] The nucleic acid sequence of interest to be introduced or integrated into the plant genome may comprise additionally or alternatively the entirety of the nucleic acid sequence of SEQ ID NO: 50, or a portion of the nucleic acid sequence of SEQ ID NO: 50, wherein the nucleic acid sequence of interest comprises one or more of the following polymorphisms:
[0608] i. a “C” at position 413 referenced to SEQ ID NO: 50,
[0609] ii. a “C” at position 958 referenced to SEQ ID NO: 50,
[0610] iii. a “C” at position 971 referenced to SEQ ID NO: 50,
[0611] iv. a “T” at position 1099 referenced to SEQ ID NO: 50,
[0612] v. an “A” at position 1154 referenced to SEQ ID NO: 50,
[0613] vi. a “T” at position 1250 referenced to SEQ ID NO: 50,
[0614] vii. a “G” at position 1607 referenced to SEQ ID NO: 50,
[0615] viii. a “G” at position 2001 referenced to SEQ ID NO: 50,
[0616] ix. an “A” at position 2598 referenced to SEQ ID NO: 50, and
[0617] x. an “A” at position 3342 referenced to SEQ ID NO: 50.

[0618] In certain embodiments, the nucleic acid sequence of interest is operatively linked to a heterologous regulatory element, preferably to a heterologous promoter. In certain embodiments, the nucleic acid sequence of interest may comprise an expression cassette comprising any of the above nucleotide sequences.

[0619] The method may be effective to introduce, or integrate, the sequence of interest into chromosome 4 or 6 of the cell of the maize plant. Introduction of the sequence of interest may be sufficient to confer to a maize plant cultivated from the modified maize cell a resistance to a fungal pathogen, e.g., a fungal pathogen causing anthracnose stalk rot. To detect whether the sequence of interest has been integrated into chromosome 4 or 6 of the cell, PCR amplification of genomic DNA from the cell or its progeny may be performed using primers. In some embodiments, the primers detect a variant nucleotide of Table 13. In some embodiments, the primers detect a variant nucleotide selected from any of SEQ ID NOS: 58-78. In some embodiments, the nucleic acid sequence of interest does not produce the amplicon according to SEQ ID NO: 119 (Amplicon 7) upon polymerase chain reaction amplification using primers of SEQ ID NOs: 120 and 121, primers of SEQ ID NOs: 122 and 123, or primers of SEQ ID NOs: 124 and 125. In some embodiments, the nucleic acid sequence of interest does not produce an amplicon selected from the group consisting of SEQ ID NOs: 94, 101, 106, 109, and 114 upon polymerase chain reaction amplification by means of primers of SEQ ID NOs: 95 and 96, primers of SEQ ID NOs: 97 and 98, primers of SEQ ID NOs: 99 and 100, primers of SEQ ID NOs: 101 and 102, primers of SEQ ID NOs: 103 and 104, primers of SEQ ID NOs: 105 and 106, primers of SEQ ID NOs: 107 and 108, primers of SEQ ID NOs: 109 and 110, primers of SEQ ID NOs: 111 and 112, primers of SEQ ID NOs: 113 and 114, primers of SEQ ID NOs: 115 and 116, or primers of SEQ ID NOs: 117 and 118. In certain embodiments, the nucleic acid sequence of interest is operatively linked to a heterologous regulatory element, preferably to a heterologous promoter. In certain embodiments, the nucleic acid sequence of interest may comprise an expression cassette comprising any of the above nucleotide sequences.

[0620] The nucleic acid sequence of interest may comprise one or more nucleotide sequences selected from the group consisting of:
[0621] i. a nucleotide sequence of SEQ ID NO: 209, 212, 215, 218, 221, 224, 227, 230, 233, 236, 239, 242, 245, 248, 251, 254, 257, 260, 263, 266 or 269, preferably SEQ ID NO: 266 or 269,
[0622] ii. a nucleotide sequence having a coding sequence of SEQ ID NO: 210, 213, 216, 219, 222, 225, 228, 231, 234, 240, 243, 246, 249, 252, 255, 258, 261, 264, 267 or 270, preferably SEQ ID NO: 267 or 270,
[0623] iii. a nucleotide sequence which is complementary to a sequence from i. or ii.,
[0624] iv. a nucleotide sequence with at least 80% or 85%, preferably at least 90%, 91%, 92%, 93%, 94% or 95%, more preferably at least 96%, 97%, 98% or 99% identity to a sequence from i., ii. or iii.,
[0625] v. a nucleotide sequence which differs from a nucleic acid sequence according to i., ii. or iii. depending on the degeneracy of the genetic code,
[0626] vi. a nucleotide sequence which hybridizes with a nucleic acid sequence according to i., ii. or iii. under stringent conditions,
[0627] vii. a nucleotide sequence which encodes for a protein comprising the sequence of SEQ ID NO: 211, 214, 217, 220, 223, 226, 229, 232, 235, 238, 241, 244, 247, 250, 253, 256, 259, 262, 265, 268 or 271, preferably SEQ ID NO: 268 or 271, or
[0628] viii. a nucleotide sequence which encodes for a protein comprising a sequence with at least 80% or 85%, preferably at least 90%, 91%, 92%, 93%, 94% or 95%, more preferably at least 96%, 97%, 98% or 99% identity to the sequence of SEQ ID NO: 211, 214, 217, 220, 223, 226, 229, 232, 235, 238, 241, 244, 247, 250, 253, 256, 259, 262, 265, 268 or 271, preferably SEQ ID NO: 268 or 271.

[0629] In certain embodiments, the nucleic acid sequence of interest is operatively linked to a heterologous regulatory element, preferably to a heterologous promoter. In certain embodiments, the nucleic acid sequence of interest may comprise an expression cassette comprising any of the above nucleotide sequences i) through viii). Introduction of the sequence of interest may be sufficient to confer to a maize plant cultivated from the modified maize cell a resistance to a fungal pathogen, e.g., a fungal pathogen causing anthracnose stalk rot.

[0630] The nucleic acid sequence of interest may comprise a nucleotide sequence encoding for a protein comprising the sequence of any one of SEQ ID NO: 211, or a protein comprising a sequence at least 80%, 81%, 82%, 83%, 84%, 85%, 86%, 87%, 88%, 89%, 90%, 91%, 92%, 93%, 94%, 95%, 96%, 97%, 98%, or 99% identical to a protein comprising the sequence of any one of SEQ ID NO: 211. Alternatively, the nucleic acid sequence of interest may comprise a nucleotide sequence encoding for a protein comprising the sequence of SEQ ID NO: 214, or a protein comprising a sequence at least 80%, 81%, 82%, 83%, 84%, 85%, 86%, 87%, 88%, 89%, 90%, 91%, 92%, 93%, 94%, 95%, 96%, 97%, 98%, or 99% identical to a protein comprising the sequence of SEQ ID NO: 214. Alternatively, the nucleic acid sequence of interest may comprise a nucleotide sequence encoding for a protein comprising the sequence of SEQ ID NO: 217, or a protein comprising a sequence at least 80%, 81%, 82%, 83%, 84%, 85%, 86%, 87%, 88%, 89%, 90%, 91%, 92%, 93%, 94%, 95%, 96%, 97%, 98%, or 99% identical to a protein comprising the sequence of SEQ ID NO: 217. Alternatively, the nucleic acid sequence of interest may comprise a nucleotide sequence encoding for a protein comprising the sequence of SEQ ID NO: 220, or a protein comprising a sequence at least 80%, 81%, 82%, 83%, 84%, 85%, 86%, 87%, 88%, 89%, 90%, 91%, 92%, 93%, 94%, 95%, 96%, 97%, 98%, or 99% identical to a protein comprising the sequence of SEQ ID NO: 220. Alternatively, the nucleic acid sequence of interest may comprise a nucleotide sequence encoding for a protein comprising the sequence of SEQ ID NO: 223, or a protein comprising a sequence at least 80%, 81%, 82%, 83%, 84%, 85%, 86%, 87%, 88%, 89%, 90%, 91%, 92%, 93%, 94%, 95%, 96%, 97%, 98%, or 99% identical to a protein comprising the sequence of SEQ ID NO: 223. Alternatively, the nucleic acid sequence of interest may comprise a nucleotide sequence encoding for a protein comprising the sequence of SEQ ID NO: 226, or a protein comprising a sequence at least 80%, 81%, 82%, 83%, 84%, 85%, 86%, 87%, 88%, 89%, 90%, 91%, 92%, 93%, 94%, 95%, 96%, 97%, 98%, or 99% identical to a protein comprising the sequence of SEQ ID NO: 226. Alternatively, the nucleic acid sequence of interest may comprise a nucleotide sequence encoding for a protein comprising the sequence of SEQ ID NO: 229, or a protein comprising a sequence at least 80%, 81%, 82%, 83%, 84%, 85%, 86%, 87%, 88%, 89%, 90%, 91%, 92%, 93%, 94%, 95%, 96%, 97%, 98%, or 99% identical to a protein comprising the sequence of SEQ ID NO: 229. Alternatively, the nucleic acid sequence of interest may comprise a nucleotide sequence encoding for a protein comprising the sequence of SEQ ID NO: 232, or a protein comprising a sequence at least 80%, 81%, 82%, 83%, 84%, 85%, 86%, 87%, 88%, 89%, 90%, 91%, 92%, 93%, 94%, 95%, 96%, 97%, 98%, or 99% identical to a protein comprising the sequence of SEQ ID NO: 232. In certain embodiments, the nucleic acid sequence of interest may comprise an expression cassette comprising any of the above nucleotide sequences

[0631] The nucleic acid sequence of interest may comprise a nucleotide sequence encoding for a protein comprising the sequence of SEQ ID NO: 235, or a protein comprising a sequence at least 80%, 81%, 82%, 83%, 84%, 85%, 86%, 87%, 88%, 89%, 90%, 91%, 92%, 93%, 94%, 95%, 96%, 97%, 98%, or 99% identical to a protein comprising the sequence of SEQ ID NO: 235. The nucleic acid sequence of interest may comprise a nucleotide sequence encoding for a protein comprising the sequence of SEQ ID NO: 238, or a protein comprising a sequence at least 80%, 81%, 82%, 83%, 84%, 85%, 86%, 87%, 88%, 89%, 90%, 91%, 92%, 93%, 94%, 95%, 96%, 97%, 98%, or 99% identical to a protein comprising the sequence of SEQ ID NO: 238. The nucleic acid sequence of interest may comprise a nucleotide sequence encoding for a protein comprising the sequence of SEQ ID NO: 241, or a protein comprising a sequence at least 80%, 81%, 82%, 83%, 84%, 85%, 86%, 87%, 88%, 89%, 90%, 91%, 92%, 93%, 94%, 95%, 96%, 97%, 98%, or 99% identical to a protein comprising the sequence of SEQ ID NO: 241. The nucleic acid sequence of interest may comprise a nucleotide sequence encoding for a protein comprising the sequence of SEQ ID NO: 244, or a protein comprising a sequence at least 80%, 81%, 82%, 83%, 84%, 85%, 86%, 87%, 88%, 89%, 90%, 91%, 92%, 93%, 94%, 95%, 96%, 97%, 98%, or 99% identical to a protein comprising the sequence of SEQ ID NO: 244. The nucleic acid sequence of interest may comprise a nucleotide sequence encoding for a protein comprising the sequence of SEQ ID NO: 247, or a protein comprising a sequence at least 80%, 81%, 82%, 83%, 84%, 85%, 86%, 87%, 88%, 89%, 90%, 91%, 92%, 93%, 94%, 95%, 96%, 97%, 98%, or 99% identical to a protein comprising the sequence of SEQ ID NO: 247. The nucleic acid sequence of interest may comprise a nucleotide sequence encoding for a protein comprising the sequence of SEQ ID NO: 250, or a protein comprising a sequence at least 80%, 81%, 82%, 83%, 84%, 85%, 86%, 87%, 88%, 89%, 90%, 91%, 92%, 93%, 94%, 95%, 96%, 97%, 98%, or 99% identical to a protein comprising the sequence of SEQ ID NO: 250. The nucleic acid sequence of interest may comprise a nucleotide sequence encoding for a protein comprising the sequence of SEQ ID NO: 253, or a protein comprising a sequence at least 80%, 81%, 82%, 83%, 84%, 85%, 86%, 87%, 88%, 89%, 90%, 91%, 92%, 93%, 94%, 95%, 96%, 97%, 98%, or 99% identical to a protein comprising the sequence of SEQ ID NO: 253. The nucleic acid sequence of interest may comprise a nucleotide sequence encoding for a protein comprising the sequence of SEQ ID NO: 256, or a protein comprising a sequence at least 80%, 81%, 82%, 83%, 84%, 85%, 86%, 87%, 88%, 89%, 90%, 91%, 92%, 93%, 94%, 95%, 96%, 97%, 98%, or 99% identical to a protein comprising the sequence of SEQ ID NO: 256. The nucleic acid sequence of interest may comprise a nucleotide sequence encoding for a protein comprising the sequence of SEQ ID NO: 259, or a protein comprising a sequence at least 80%, 81%, 82%, 83%, 84%, 85%, 86%, 87%, 88%, 89%, 90%, 91%, 92%, 93%, 94%, 95%, 96%, 97%, 98%, or 99% identical to a protein comprising the sequence of SEQ ID NO: 259. Alternatively, the nucleic acid sequence of interest may comprise a nucleotide sequence encoding for a protein comprising the sequence of SEQ ID NO: 262, or a protein comprising a sequence at least 80%, 81%, 82%, 83%, 84%, 85%, 86%, 87%, 88%, 89%, 90%, 91%, 92%, 93%, 94%, 95%, 96%, 97%, 98%, or 99% identical to a protein comprising the sequence of SEQ ID NO: 262. The nucleic acid sequence of interest may comprise a nucleotide sequence encoding for a protein comprising the sequence of SEQ ID NO: 265, or a protein comprising a sequence at least 80%, 81%, 82%, 83%, 84%, 85%, 86%, 87%, 88%, 89%, 90%, 91%, 92%, 93%, 94%, 95%, 96%, 97%, 98%, or 99% identical to a protein comprising the sequence of SEQ ID NO: 265. Alternatively, the nucleic acid sequence of interest may comprise a nucleotide sequence encoding for a protein comprising the sequence of SEQ ID NO: 268, or a protein comprising a sequence at least 80%, 81%, 82%, 83%, 84%, 85%, 86%, 87%, 88%, 89%, 90%, 91%, 92%, 93%, 94%, 95%, 96%, 97%, 98%, or 99% identical to a protein comprising the sequence of SEQ ID NO: 268. Alternatively, the nucleic acid sequence of interest may comprise a nucleotide sequence encoding for a protein comprising the sequence of SEQ ID NO: 271, or a protein comprising a sequence at least 80%, 81%, 82%, 83%, 84%, 85%, 86%, 87%, 88%, 89%, 90%, 91%, 92%, 93%, 94%, 95%, 96%, 97%, 98%, or 99% identical to a protein comprising the sequence of SEQ ID NO: 271. In certain embodiments, the nucleic acid sequence of interest may comprise an expression cassette comprising any of the above nucleotide sequences.

[0632] The nucleic acid sequence of interest may comprise one or more nucleotide sequences selected from the group consisting of
[0633] i. a nucleotide sequence of SEQ ID NO: 1, 20, 23, 44 or 47,
[0634] ii. a nucleotide sequence which is complementary to a sequence from i.,
[0635] iii. a nucleotide sequence which has at least 80% or 85%, preferably at least 90%, 91%, 92%, 93%, 94% or 95%, more preferably at least 96%, 97%, 98% or 99% identity with a sequence from i. or ii.,
[0636] iv. a nucleotide sequence which differs from a nucleic acid sequence according to i., ii. or iii. depending on the degeneracy of the genetic code,
[0637] v. a nucleotide sequence which hybridizes with a nucleic acid sequence according to i., ii. or iii. under stringent conditions,
[0638] vi. a nucleotide sequence which encodes for a protein comprising the sequence of SEQ ID NO: 11-19, 22, 34-43, 46 or 49, or
[0639] vii. a nucleotide sequence which encodes for a protein which has at least 80% or 85%, preferably at least 90%, 91%, 92%, 93%, 94% or 95%, more preferably at least 960%, 97%, 98% or 99% identity with the sequence of SEQ ID NOs: 11-19, 22, 34-43, 46 or 49.

[0640] In certain embodiments, the nucleic acid sequence of interest is operatively linked to a heterologous regulatory element, preferably to a heterologous promoter. In certain embodiments, the nucleic acid sequence of interest may comprise an expression cassette comprising any of the above nucleic acids i) through vii). Introduction of the sequence of interest may be sufficient to confer to a maize plant cultivated from the modified maize cell a resistance to a fungal pathogen, e.g., a fungal pathogen causing anthracnose stalk rot.

[0641] The nucleic acid sequence of interest may comprise a nucleotide sequence encoding for a protein comprising the sequence of SEQ ID NO: 11, or a protein comprising a sequence at least 80%, 81%, 82%, 83%, 84%, 85%, 86%, 87%, 88%, 89%, 90%, 91%, 92%, 93%, 94%, 95%, 96%, 97%, 98%, or 99% identical to a protein comprising the sequence of SEQ ID NO: 11. The nucleic acid sequence of interest may comprise a nucleotide sequence encoding for a protein comprising the sequence of SEQ ID NO: 12, or a protein comprising a sequence at least 80%, 81%, 82%, 83%, 84%, 85%, 86%, 87%, 88%, 89%, 90%, 91%, 92%, 93%, 94%, 95%, 96%, 97%, 98%, or 99% identical to a protein comprising the sequence of SEQ ID NO: 12. The nucleic acid sequence of interest may comprise a nucleotide sequence encoding for a protein comprising the sequence of SEQ ID NO: 13, or a protein comprising a sequence at least 80%, 81%, 82%, 83%, 84%, 85%, 86%, 87%, 88%, 89%, 90%, 91%, 92%, 93%, 94%, 95%, 96%, 97%, 98%, or 99% identical to a protein comprising the sequence of SEQ ID NO: 13. The nucleic acid sequence of interest may comprise a nucleotide sequence encoding for a protein comprising the sequence of SEQ ID NO: 14, or a protein comprising a sequence at least 80%, 81%, 82%, 83%, 84%, 85%, 86%, 87%, 88%, 89%, 90%, 91%, 92%, 93%, 94%, 95%, 96%, 97%, 98%, or 99% identical to a protein comprising the sequence of SEQ ID NO: 14. The nucleic acid sequence of interest may comprise a nucleotide sequence encoding for a protein comprising the sequence of SEQ ID NO: 15, or a protein comprising a sequence at least 80%, 81%, 82%, 83%, 84%, 85%, 86%, 87%, 88%, 89%, 90%, 91%, 92%, 93%, 94%, 95%, 96%, 97%, 98%, or 99% identical to a protein comprising the sequence of SEQ ID NO: 15. The nucleic acid sequence of interest may comprise a nucleotide sequence encoding for a protein comprising the sequence of SEQ ID NO: 16, or a protein comprising a sequence at least 80%, 81%, 82%, 83%, 84%, 85%, 86%, 87%, 88%, 89%, 90%, 91%, 92%, 93%, 94%, 95%, 96%, 97%, 98%, or 99% identical to a protein comprising the sequence of SEQ ID NO: 16. The nucleic acid sequence of interest may comprise a nucleotide sequence encoding for a protein comprising the sequence of SEQ ID NO: 17, or a protein comprising a sequence at least 80%, 81%, 82%, 83%, 84%, 85%, 86%, 87%, 88%, 89%, 90%, 91%, 92%, 93%, 94%, 95%, 96%, 97%, 98%, or 99% identical to a protein comprising the sequence of SEQ ID NO: 17. The nucleic acid sequence of interest may comprise a nucleotide sequence encoding for a protein comprising the sequence of SEQ ID NO: 18, or a protein comprising a sequence at least 80%, 81%, 82%, 83%, 84%, 85%, 86%, 87%, 88%, 89%, 90%, 91%, 92%, 93%, 94%, 95%, 96%, 97%, 98%, or 99% identical to a protein comprising the sequence of SEQ ID NO: 18. The nucleic acid sequence of interest may comprise a nucleotide sequence encoding for a protein comprising the sequence of SEQ ID NO: 19, or a protein comprising a sequence at least 80%, 81%, 82%, 83%, 84%, 85%, 86%, 87%, 88%, 89%, 90%, 91%, 92%, 93%, 94%, 95%, 96%, 97%, 98%, or 99% identical to a protein comprising the sequence of SEQ ID NO: 19.

[0642] The nucleic acid sequence of interest may comprise a nucleotide sequence encoding for a protein comprising the sequence of SEQ ID NO: 22, or a protein comprising a sequence at least 80%, 81%, 82%, 83%, 84%, 85%, 86%, 87%, 88%, 89%, 90%, 91%, 92%, 93%, 94%, 95%, 96%, 97%, 98%, or 99% identical to a protein comprising the sequence of SEQ ID NO: 22. The nucleic acid sequence of interest may comprise a nucleotide sequence encoding for a protein comprising the sequence of SEQ ID NO: 34, or a protein comprising a sequence at least 80%, 81%, 82%, 83%, 84%, 85%, 86%, 87%, 88%, 89%, 90%, 91%, 92%, 93%, 94%, 95%, 96%, 97%, 98%, or 99% identical to a protein comprising the sequence of SEQ ID NO: 34. The nucleic acid sequence of interest may comprise a nucleotide sequence encoding for a protein comprising the sequence of SEQ ID NO: 35, or a protein comprising a sequence at least 80%, 81%, 82%, 83%, 84%, 85%, 86%, 87%, 88%, 89%, 90%, 91%, 92%, 93%, 94%, 95%, 96%, 97%, 98%, or 99% identical to a protein comprising the sequence of SEQ ID NO: 35. The nucleic acid sequence of interest may comprise a nucleotide sequence encoding for a protein comprising the sequence of SEQ ID NO: 36, or a protein comprising a sequence at least 80%, 81%, 82%, 83%, 84%, 85%, 86%, 87%, 88%, 89%, 90%, 91%, 92%, 93%, 94%, 95%, 96%, 97%, 98%, or 99% identical to a protein comprising the sequence of SEQ ID NO: 36. The nucleic acid sequence of interest may comprise a nucleotide sequence encoding for a protein comprising the sequence of SEQ ID NO: 37, or a protein comprising a sequence at least 80%, 81%, 82%, 83%, 84%, 85%, 86%, 87%, 88%, 89%, 90%, 91%, 92%, 93%, 94%, 95%, 96%, 97%, 98%, or 99% identical to a protein comprising the sequence of SEQ ID NO: 37. The nucleic acid sequence of interest may comprise a nucleotide sequence encoding for a protein comprising the sequence of SEQ ID NO: 38, or a protein comprising a sequence at least 80%, 81%, 82%, 83%, 84%, 85%, 86%, 87%, 88%, 89%, 90%, 91%, 92%, 93%, 94%, 95%, 96%, 97%, 98%, or 99% identical to a protein comprising the sequence of SEQ ID NO: 38. The nucleic acid sequence of interest may comprise a nucleotide sequence encoding for a protein comprising the sequence of SEQ ID NO: 39, or a protein comprising a sequence at least 80%, 81%, 82%, 83%, 84%, 85%, 86%, 87%, 88%, 89%, 90%, 91%, 92%, 93%, 94%, 95%, 96%, 97%, 98%, or 99% identical to a protein comprising the sequence of SEQ ID NO: 39. The nucleic acid sequence of interest may comprise a nucleotide sequence encoding for a protein comprising the sequence of SEQ ID NO: 40, or a protein comprising a sequence at least 80%, 81%, 82%, 83%, 84%, 85%, 86%, 87%, 88%, 89%, 90%, 91%, 92%, 93%, 94%, 95%, 96%, 97%, 98%, or 99% identical to a protein comprising the sequence of SEQ ID NO: 40. The nucleic acid sequence of interest may comprise a nucleotide sequence encoding for a protein comprising the sequence of SEQ ID NO: 41, or a protein comprising a sequence at least 80%, 81%, 82%, 83%, 84%, 85%, 86%, 87%, 88%, 89%, 90%, 91%, 92%, 93%, 94%, 95%, 96%, 97%, 98%, or 99% identical to a protein comprising the sequence of SEQ ID NO: 41. The nucleic acid sequence of interest may comprise a nucleotide sequence encoding for a protein comprising the sequence of SEQ ID NO: 42, or a protein comprising a sequence at least 80%, 81%, 82%, 83%, 84%, 85%, 86%, 87%, 88%, 89%, 90%, 91%, 92%, 93%, 94%, 95%, 96%, 97%, 98%, or 99% identical to a protein comprising the sequence of SEQ ID NO: 42. The nucleic acid sequence of interest may comprise a nucleotide sequence encoding for a protein comprising the sequence of SEQ ID NO: 43, or a protein comprising a sequence at least 80%, 81%, 82%, 83%, 84%, 85%, 86%, 87%, 88%, 89%, 90%, 91%, 92%, 93%, 94%, 95%, 96%, 97%, 98%, or 99% identical to a protein comprising the sequence of SEQ ID NO: 43. The nucleic acid sequence of interest may comprise a nucleotide sequence encoding for a protein comprising the sequence of SEQ ID NO: 46, or a protein comprising a sequence at least 80%, 81%, 82%, 83%, 84%, 85%, 86%, 87%, 88%, 89%, 90%, 91%, 92%, 93%, 94%, 95%, 96%, 97%, 98%, or 99% identical to a protein comprising the sequence of SEQ ID NO: 46. The nucleic acid sequence of interest may comprise a nucleotide sequence encoding for a protein comprising the sequence of SEQ ID NO: 49, or a protein comprising a sequence at least 80%, 81%, 82%, 83%, 84%, 85%, 86%, 87%, 88%, 89%, 90%, 91%, 92%, 93%, 94%, 95%, 96%, 97%, 98%, or 99% identical to a protein comprising the sequence of SEQ ID NO: 49.

[0643] In various embodiments, the homology-directed repair is mediated by non-homologous end joining (NHEJ). Without wishing to be bound by theory, in eukaryotic cells, genome integrity is ensured by robust and partially redundant mechanisms for repairing DNA DSBs caused by environmental stresses and errors of cellular DNA processing machinery. In most eukaryotic cells and at most stages of the respective cell cycle, the non-homologous end-joining (NHEJ) DNA repair pathway is the highly dominant form of repair. A second pathway uses homologous recombination (HR) of similar DNA sequences to repair DSBs. This pathway can usually be used in the S and G2 stages of the cell cycle by templating from the duplicated homologous region of a paired chromosome to precisely repair the DSB. However, an artificially-provided repair template (RT) with homology to the target can also be used to repair the DSB, in a process known as homology-directed repair (HDR) or gene targeting. By this strategy it is possible to introduce very precise, targeted changes in the genomes of eukaryotic cells.

[0644] NHEJ is the dominant nuclear response in animals and plants which does not require homologous sequences, but is often error-prone and thus potentially mutagenic (Wyman C., Kanaar R. “DNA double-strand break repair: all's well that ends well”, Annu. Rev. Genet., 2006, 40, 363-83). Classical- and backup-NHEJ pathways are known relying on different mechanism, wherein both pathways are error-prone. Repair by HDR requires homology, but those HDR pathways that use an intact chromosome to repair the broken one, i.e. double-strand break repair and synthesis-dependent strand annealing, are highly accurate. In the classical DSB repair pathway, the 3′ ends invade an intact homologous template then serve as a primer for DNA repair synthesis, ultimately leading to the formation of double Holliday junctions (dHJs). dHJs are four-stranded branched structures that form when elongation of the invasive strand “captures” and synthesizes DNA from the second DSB end. The individual HJs are resolved via cleavage in one of two ways. Synthesis-dependent strand annealing is conservative, and results exclusively in non-crossover events. This means that all newly synthesized sequences are present on the same molecule. Unlike the NHEJ repair pathway, following strand invasion and D loop formation in synthesis-dependent strand annealing, the newly synthesized portion of the invasive strand is displaced from the template and returned to the processed end of the non-invading strand at the other DSB end. The 3′ end of the non-invasive strand is elongated and ligated to fill the gap. There is a further pathway of HDR, called break-induced repair pathway not yet fully characterized. A central feature of this pathway is the presence of only one invasive end at a DSB that can be used for repair.

[0645] In various embodiments, the homology-directed repair is mediated by microhomology-mediated end joining (MMEJ). Without wishing to be bound by theory, MMEJ has been recognized as a distinct type of DSB repair in eukaryotes. Only very short (2-14 bp) regions of homology are needed for this pathway, and it typically leaves deletions like single-strand annealing. MMEJ has also been distinguished genetically from the homologous recombination and NHEJ pathways and in mammalian cells acts as a backup to NHEJ (Kwon, T., Huq, E., & Herrin, D. L. (2010). Microhomology-mediated and nonhomologous repair of a double-strand break in the chloroplast genome of Arabidopsis. Proceedings of the National Academy of Sciences of the United States of America, 107(31), 13954-13959).

### Maize Plants Resistant to Stalk Rot

[0646] In one aspect is provided a maize plant comprising a resistance locus associated with anthracnose stalk rot resistance, wherein the resistance locus is located on chromosome 4, and where the resistance locus is introgressed into the maize plant according to any of the methods described herein. In various embodiments, the maize plant does not further comprise a resistance locus associated with anthracnose stalk rot resistance that is found on chromosome 6. In various embodiments, the maize plant only has one resistance locus associated with anthracnose stalk rot resistance that is located on chromosome 4.

[0647] In one aspect is provided a maize plant comprising a resistance locus associated with anthracnose stalk rot resistance, wherein the resistance locus is located on chromosome 6, and where the resistance locus is introgressed into the maize plant according to any of the methods described herein. The maize plant does not further comprise a resistance locus associated with anthracnose stalk rot resistance that is found on chromosome 4.

[0648] In one embodiment is provided a maize plant comprising a resistance locus on chromosome 4 associated with anthracnose stalk rot resistance, where the resistance locus located on chromosome 4 comprises a nucleic acid molecule encoding a Rcg1 resistance allele having a haplotype comprising one or more nucleotide polymorphism selected from the group consisting of:
[0649] i. a “C” at position 413 referenced to SEQ ID NO: 50,
[0650] ii. a “C” at position 958 referenced to SEQ ID NO: 50,
[0651] iii. a “C” at position 971 referenced to SEQ ID NO: 50,
[0652] iv. a “T” at position 1099 referenced to SEQ ID NO: 50,
[0653] v. an “A” at position 1154 referenced to SEQ ID NO: 50,
[0654] vi. a “T” at position 1250 referenced to SEQ ID NO: 50,
[0655] vii. a “G” at position 1607 referenced to SEQ ID NO: 50,
[0656] viii. a “G” at position 2001 referenced to SEQ ID NO: 50,
[0657] ix. an “A” at position 2598 referenced to SEQ ID NO: 50, and
[0658] x. an “A” at position 3342 referenced to SEQ ID NO: 50.

[0659] In one embodiment is provided a maize plant comprising a resistance locus on chromosome 6 associated with anthracnose stalk rot resistance, where the resistance locus located on chromosome 6 comprises a nucleic acid molecule encoding an anthracnose stalk rot resistance allele having a haplotype comprising one or more nucleotide polymorphism selected from the group consisting of:
[0660] an “A” at position 132836954 on chromosome 6 referenced to B73AGPv04, preferably detectable by marker sequence of SEQ ID NO: 273,
[0661] a “T” at position 132836944 on chromosome 6 referenced to B73AGPv04, preferably detectable by marker sequence of SEQ ID NO: 274,
[0662] an “A” at position 132836869 on chromosome 6 referenced to B73AGPv04, preferably detectable by marker sequence of SEQ ID NO: 275,
[0663] a “T” at position 132836849 on chromosome 6 referenced to B73AGPv04, preferably detectable by marker sequence of SEQ ID NO: 276,
[0664] a “T” at position 132836845 on chromosome 6 referenced to B73AGPv04, preferably detectable by marker sequence of SEQ ID NO: 277,
[0665] a “G” at position 132836840 on chromosome 6 referenced to B73AGPv04, preferably detectable by marker sequence of SEQ ID NO: 278,
[0666] a “T” at position 132836830 on chromosome 6 referenced to B73AGPv04, preferably detectable by marker sequence of SEQ ID NO: 279,
[0667] an “A” at position 132836810 on chromosome 6 referenced to B73AGPv04, preferably detectable by marker sequence of SEQ ID NO: 280,
[0668] a “CA” at position 132836805 on chromosome 6 referenced to B73AGPv04, preferably detectable by marker sequence of SEQ ID NO: 281 and/or 282,
[0669] a deletion of “ATC” at position 132836802 on chromosome 6 referenced to B73AGPv04, preferably detectable by marker sequence of SEQ ID NO: 283 and/or 284,
[0670] a deletion of “ATT” at position 132836799 on chromosome 6 referenced to B73AGPv04, preferably detectable by marker sequence of SEQ ID NO: 283 and/or 284,
[0671] an “A” at position 132836791 on chromosome 6 referenced to B73AGPv04, preferably detectable by marker sequence of SEQ ID NO: 285,
[0672] a “CTG” at position 132836787 on chromosome 6 referenced to B73AGPv04, preferably detectable by marker sequence of SEQ ID NO: 286 and/or 287,
[0673] a “GA” at position 132836781 on chromosome 6 referenced to B73AGPv04, preferably detectable by marker sequence of SEQ ID NO: 288 and/or 289,
[0674] a “T” at position 132836776 on chromosome 6 referenced to B73AGPv04, preferably detectable by marker sequence of SEQ ID NO: 290,
[0675] a “AG” at position 132836767 on chromosome 6 referenced to B73AGPv04, preferably detectable by marker sequence of SEQ ID NO: 291 and/or 292,
[0676] an “A” at position 132836762 on chromosome 6 referenced to B73AGPv04, preferably detectable by marker sequence of SEQ ID NO: 293,
[0677] an insertion of “CGCCAA” and an “A” at position 132836679 on chromosome 6 referenced to B73AGPv04, preferably detectable by marker sequence of SEQ ID NO: 294 and/or 295,
[0678] an “A” at position 132836678 on chromosome 6 referenced to B73AGPv04, preferably detectable by marker sequence of SEQ ID NO: 296,
[0679] a “G” at position 132836670 on chromosome 6 referenced to B73AGPv04, preferably detectable by marker sequence of SEQ ID NO: 297,
[0680] a “T” at position 132836667 on chromosome 6 referenced to B73AGPv04, preferably detectable by marker sequence of SEQ ID NO: 298,
[0681] an “A” at position 132836665 on chromosome 6 referenced to B73AGPv04, preferably detectable by marker sequence of SEQ ID NO: 299,
[0682] a “C” at position 132836662 on chromosome 6 referenced to B73AGPv04, preferably detectable by marker sequence of SEQ ID NO: 300,
[0683] a “T” at position 132836660 on chromosome 6 referenced to B73AGPv04, preferably detectable by marker sequence of SEQ ID NO: 301,
[0684] a “G” at position 132836651 on chromosome 6 referenced to B73AGPv04, preferably detectable by marker sequence of SEQ ID NO: 302,
[0685] a deletion of “AAT” at position 132836643 on chromosome 6 referenced to B73AGPv04, preferably detectable by marker sequence of SEQ ID NO: 303 and/or 304,
[0686] a deletion of “GCCATG” at position 132836636 on chromosome 6 referenced to B73AGPv04, preferably detectable by marker sequence of SEQ ID NO: 305 and/or 306,
[0687] a “AG” at position 132836622 on chromosome 6 referenced to B73AGPv04, preferably detectable by marker sequence of SEQ ID NO: 307 and/or 308,
[0688] a “AC” at position 132836620 on chromosome 6 referenced to B73AGPv04, preferably detectable by marker sequence of SEQ ID NO: 309 and/or 310,
[0689] a “G” at position 132836612 on chromosome 6 referenced to B73AGPv04, preferably detectable by marker sequence of SEQ ID NO: 311,
[0690] a “G” at position 132836603 on chromosome 6 referenced to B73AGPv04, preferably detectable by marker sequence of SEQ ID NO: 312,
[0691] a “C” at position 132836591 on chromosome 6 referenced to B73AGPv04, preferably detectable by marker sequence of SEQ ID NO: 313,
[0692] an “A” at position 132836586 on chromosome 6 referenced to B73AGPv04, preferably detectable by marker sequence of SEQ ID NO: 314,
[0693] a “G” at position 132836580 on chromosome 6 referenced to B73AGPv04, preferably detectable by marker sequence of SEQ ID NO: 315,
[0694] an “A” at position 132836069 on chromosome 6 referenced to B73AGPv04, preferably detectable by marker sequence of SEQ ID NO: 316,
[0695] an “A” at position 132836063 on chromosome 6 referenced to B73AGPv04, preferably detectable by marker sequence of SEQ ID NO: 317,
[0696] a “G” at position 132836061 on chromosome 6 referenced to B73AGPv04, preferably detectable by marker sequence of SEQ ID NO: 318,
[0697] a “G” at position 132836056 on chromosome 6 referenced to B73AGPv04, preferably detectable by marker sequence of SEQ ID NO: 319,
[0698] a “C” at position 132836050 on chromosome 6 referenced to B73AGPv04, preferably detectable by marker sequence of SEQ ID NO: 320,
[0699] a “CGT” at position 132836047 on chromosome 6 referenced to B73AGPv04, preferably detectable by marker sequence of SEQ ID NO: 321 and/or 322,
[0700] a “G” at position 132836034 on chromosome 6 referenced to B73AGPv04, preferably detectable by marker sequence of SEQ ID NO: 323,
[0701] a “G” at position 132836031 on chromosome 6 referenced to B73AGPv04, preferably detectable by marker sequence of SEQ ID NO: 324,
[0702] a “T” at position 132836019 on chromosome 6 referenced to B73AGPv04, preferably detectable by marker sequence of SEQ ID NO: 325,
[0703] a “G” at position 132836008 on chromosome 6 referenced to B73AGPv04, preferably detectable by marker sequence of SEQ ID NO: 326,
[0704] a “G” at position 132835978 on chromosome 6 referenced to B73AGPv04, preferably detectable by marker sequence of SEQ ID NO: 327,
[0705] a “G” at position 132835910 on chromosome 6 referenced to B73AGPv04, preferably detectable by marker sequence of SEQ ID NO: 328,
[0706] a “G” at position 132835851 on chromosome 6 referenced to B73AGPv04, preferably detectable by marker sequence of SEQ ID NO: 329,
[0707] a “C” at position 132835819 on chromosome 6 referenced to B73AGPv04, preferably detectable by marker sequence of SEQ ID NO: 330,
[0708] a “G” at position 132835803 on chromosome 6 referenced to B73AGPv04, preferably detectable by marker sequence of SEQ ID NO: 331,
[0709] a “T” at position 132835793 on chromosome 6 referenced to B73AGPv04, preferably detectable by marker sequence of SEQ ID NO: 332,
[0710] a “C” at position 132835788 on chromosome 6 referenced to B73AGPv04, preferably detectable by marker sequence of SEQ ID NO: 333,
[0711] an “A” at position 132835781 on chromosome 6 referenced to B73AGPv04, preferably detectable by marker sequence of SEQ ID NO: 334,
[0712] an “A” at position 132835779 on chromosome 6 referenced to B73AGPv04, preferably detectable by marker sequence of SEQ ID NO: 335,
[0713] a “T” at position 132835776 on chromosome 6 referenced to B73AGPv04, preferably detectable by marker sequence of SEQ ID NO: 336,
[0714] a “G” at position 132835746 on chromosome 6 referenced to B73AGPv04, preferably detectable by marker sequence of SEQ ID NO: 337,
[0715] an “A” at position 132835729 on chromosome 6 referenced to B73AGPv04, preferably detectable by marker sequence of SEQ ID NO: 338,
[0716] a “C” at position 132835728 on chromosome 6 referenced to B73AGPv04, preferably detectable by marker sequence of SEQ ID NO: 339, an insertion of “GACATC” at position 132835722 on chromosome 6 referenced to B73AGPv04, preferably detectable by marker sequence of SEQ ID NO: 340 and/or 341,
[0717] a “T” at position 132835713 on chromosome 6 referenced to B73AGPv04, preferably detectable by marker sequence of SEQ ID NO: 342,
[0718] a deletion of “GAA” at position 132835708 on chromosome 6 referenced to B73AGPv04, preferably detectable by marker sequence of SEQ ID NO: 343 and/or 344,
[0719] a deletion of “ATA” at position 132835705 on chromosome 6 referenced to B73AGPv04, preferably detectable by marker sequence of SEQ ID NO: 343 and/or 344,
[0720] a deletion of “GAT” at position 132835702 on chromosome 6 referenced to B73AGPv04, preferably detectable by marker sequence of SEQ ID NO: 343 and/or 344,
[0721] a “G” at position 132835693 on chromosome 6 referenced to B73AGPv04, preferably detectable by marker sequence of SEQ ID NO: 345,
[0722] a “T” at position 132835681 on chromosome 6 referenced to B73AGPv04, preferably detectable by marker sequence of SEQ ID NO: 346,
[0723] a “C” at position 132835671 on chromosome 6 referenced to B73AGPv04, preferably detectable by marker sequence of SEQ ID NO: 347,
[0724] a “T” at position 132835666 on chromosome 6 referenced to B73AGPv04, preferably detectable by marker sequence of SEQ ID NO: 348,
[0725] an “A” at position 132835271 on chromosome 6 referenced to B73AGPv04, preferably detectable by marker sequence of SEQ ID NO: 349,
[0726] a “GG” at position 132835267 on chromosome 6 referenced to B73AGPv04, preferably detectable by marker sequence of SEQ ID NO: 350 and/or 351,
[0727] a “T” at position 132835147 on chromosome 6 referenced to B73AGPv04, preferably detectable by marker sequence of SEQ ID NO: 352,
[0728] a “C” at position 132835031 on chromosome 6 referenced to B73AGPv04, preferably detectable by marker sequence of SEQ ID NO: 353,
[0729] an “A” at position 132834960 on chromosome 6 referenced to B73AGPv04, preferably detectable by marker sequence of SEQ ID NO: 354,
[0730] an “A” at position 132834951 on chromosome 6 referenced to B73AGPv04, preferably detectable by marker sequence of SEQ ID NO: 355,
[0731] a “AC” at position 132834946 on chromosome 6 referenced to B73AGPv04, preferably detectable by marker sequence of SEQ ID NO: 356 and/or 357,
[0732] an “A” at position 132834942 on chromosome 6 referenced to B73AGPv04, preferably detectable by marker sequence of SEQ ID NO: 358,
[0733] an “A” at position 132834929 on chromosome 6 referenced to B73AGPv04, preferably detectable by marker sequence of SEQ ID NO: 359,
[0734] a “T” at position 132834927 on chromosome 6 referenced to B73AGPv04, preferably detectable by marker sequence of SEQ ID NO: 360,
[0735] an “A” at position 132834924 on chromosome 6 referenced to B73AGPv04, preferably detectable by marker sequence of SEQ ID NO: 361,
[0736] a “C” at position 132834919 on chromosome 6 referenced to B73AGPv04, preferably detectable by marker sequence of SEQ ID NO: 362,
[0737] a “T” at position 132834908 on chromosome 6 referenced to B73AGPv04, preferably detectable by marker sequence of SEQ ID NO: 363,
[0738] an “A” at position 132834899 on chromosome 6 referenced to B73AGPv04, preferably detectable by marker sequence of SEQ ID NO: 364,
[0739] a “C” at position 132834754 on chromosome 6 referenced to B73AGPv04, preferably detectable by marker sequence of SEQ ID NO: 365,
[0740] a “C” at position 132834753 on chromosome 6 referenced to B73AGPv04, preferably detectable by marker sequence of SEQ ID NO: 366,
[0741] a “C” at position 132834748 on chromosome 6 referenced to B73AGPv04, preferably detectable by marker sequence of SEQ ID NO: 367,
[0742] an “A” at position 132834721 on chromosome 6 referenced to B73AGPv04, preferably detectable by marker sequence of SEQ ID NO: 368,
[0743] an “A” at position 132834632 on chromosome 6 referenced to B73AGPv04, preferably detectable by marker sequence of SEQ ID NO: 369,
[0744] a “C” at position 132834622 on chromosome 6 referenced to B73AGPv04, preferably detectable by marker sequence of SEQ ID NO: 370,
[0745] a “G” at position 132834615 on chromosome 6 referenced to B73AGPv04, preferably detectable by marker sequence of SEQ ID NO: 371,
[0746] a “C” at position 132834602 on chromosome 6 referenced to B73AGPv04,
[0747] a “G” at position 132834589 on chromosome 6 referenced to B73AGPv04, preferably detectable by marker sequence of SEQ ID NO: 372,
[0748] a “T” at position 132834581 on chromosome 6 referenced to B73AGPv04, preferably detectable by marker sequence of SEQ ID NO: 373,
[0749] an “A” at position 132834577 on chromosome 6 referenced to B73AGPv04, preferably detectable by marker sequence of SEQ ID NO: 374,
[0750] a “G” at position 132834569 on chromosome 6 referenced to B73AGPv04, preferably detectable by marker sequence of SEQ ID NO: 375,
[0751] a “C” at position 132834539 on chromosome 6 referenced to B73AGPv04, preferably detectable by marker sequence of SEQ ID NO: 376,
[0752] a “GAG” at position 132834532 on chromosome 6 referenced to B73AGPv04, preferably detectable by marker sequence of SEQ ID NO: 377 and/or 378,
[0753] a “T” at position 132834494 on chromosome 6 referenced to B73AGPv04, preferably detectable by marker sequence of SEQ ID NO: 379,
[0754] a “T” at position 132834431 on chromosome 6 referenced to B73AGPv04, preferably detectable by marker sequence of SEQ ID NO: 380,
[0755] a “G” at position 132834389 on chromosome 6 referenced to B73AGPv04, preferably detectable by marker sequence of SEQ ID NO: 381,
[0756] a “T” at position 132834208 on chromosome 6 referenced to B73AGPv04, preferably detectable by marker sequence of SEQ ID NO: 382,
[0757] a “T” at position 132831963 on chromosome 6 referenced to B73AGPv04, preferably detectable by marker sequence of SEQ ID NO: 383,
[0758] a “G” at position 132831924 on chromosome 6 referenced to B73AGPv04, preferably detectable by marker sequence of SEQ ID NO: 384,
[0759] an “A” at position 132831915 on chromosome 6 referenced to B73AGPv04, preferably detectable by marker sequence of SEQ ID NO: 385,
[0760] a “G” at position 132831839 on chromosome 6 referenced to B73AGPv04, preferably detectable by marker sequence of SEQ ID NO: 386,
[0761] a “T” at position 132829096 on chromosome 6 referenced to B73AGPv04, preferably detectable by marker sequence of SEQ ID NO: 387,
[0762] an “A” at position 132828997 on chromosome 6 referenced to B73AGPv04, preferably detectable by marker sequence of SEQ ID NO: 388,
[0763] a “G” at position 132828958 on chromosome 6 referenced to B73AGPv04, preferably detectable by marker sequence of SEQ ID NO: 389,
[0764] a “G” at position 132828950 on chromosome 6 referenced to B73AGPv04, preferably detectable by marker sequence of SEQ ID NO: 390,
[0765] a “C” at position 132828867 on chromosome 6 referenced to B73AGPv04, preferably detectable by marker sequence of SEQ ID NO: 391,
[0766] an “A” at position 132827606 on chromosome 6 referenced to B73AGPv04, preferably detectable by marker sequence of SEQ ID NO: 392,
[0767] an insertion of “AGTTCATAATAAAGTGATAGAGTT” (SEQ ID NO: 414) at position 132827596 on chromosome 6 referenced to B73AGPv04, preferably detectable by marker sequence of SEQ ID NO: 393 and/or 394,
[0768] a “T” at position 132827573 on chromosome 6 referenced to B73AGPv04, preferably detectable by marker sequence of SEQ ID NO: 395,
[0769] a “G” at position 132827566 on chromosome 6 referenced to B73AGPv04, preferably detectable by marker sequence of SEQ ID NO: 396,
[0770] an “A” at position 132827549 on chromosome 6 referenced to B73AGPv04, preferably detectable by marker sequence of SEQ ID NO: 397,
[0771] a “TAT” at position 132827545 on chromosome 6 referenced to B73AGPv04, preferably detectable by marker sequence of SEQ ID NO: 398 and/or 399,
[0772] a “C” at position 132827302 on chromosome 6 referenced to B73AGPv04, preferably detectable by marker sequence of SEQ ID NO: 400,
[0773] a “T” at position 132826983 on chromosome 6 referenced to B73AGPv04, preferably detectable by marker sequence of SEQ ID NO: 401,
[0774] a “T” at position 132826940 on chromosome 6 referenced to B73AGPv04, preferably detectable by marker sequence of SEQ ID NO: 402,
[0775] a “T” at position 1333040380 on chromosome 6 referenced to B73AGPv04, preferably detectable by marker sequence of SEQ ID NO: 403,
[0776] a “C” at position 1333040382 on chromosome 6 referenced to B73AGPv04, preferably detectable by marker sequence of SEQ ID NO: 404, or
[0777] a “T” at position 133040760 on chromosome 6 referenced to B73AGPv04, preferably detectable by marker sequence of SEQ ID NO: 405.

[0778] In some embodiments, the nucleic acid molecule encoding a Rcg1 resistance allele has a haplotype comprising a single nucleotide polymorphism of “C” at position 413 referenced to SEQ ID NO: 50. In some embodiments, the nucleic acid molecule encoding a Rcg1 resistance allele has a haplotype comprising a single nucleotide polymorphism of “C” at position 958 referenced to SEQ ID NO: 50. In some embodiments, the nucleic acid molecule encoding a Rcg1 resistance allele has a haplotype comprising a single nucleotide polymorphism of “C” at position 971 referenced to SEQ ID NO: 50. In some embodiments, the nucleic acid molecule encoding a Rcg1 resistance allele has a haplotype comprising a single nucleotide polymorphism of “T” at position 1099 referenced to SEQ ID NO: 50. In some embodiments, the nucleic acid molecule encoding a Rcg1 resistance allele has a haplotype comprising a single nucleotide polymorphism of “A” at position 1154 referenced to SEQ ID NO: 50. In some embodiments, the nucleic acid molecule encoding a Rcg1 resistance allele has a haplotype comprising a single nucleotide polymorphism of “T” at position 1250 referenced to SEQ ID NO: 50. In some embodiments, the nucleic acid molecule encoding a Rcg1 resistance allele has a haplotype comprising a single nucleotide polymorphism of “G” at position 1607 referenced to SEQ ID NO: 50. In some embodiments, the nucleic acid molecule encoding a Rcg1 resistance allele has a haplotype comprising a single nucleotide polymorphism of “G” at position 2001 referenced to SEQ ID NO: 50. In some embodiments, the nucleic acid molecule encoding a Rcg1 resistance allele has a haplotype comprising a single nucleotide polymorphism of “A” at position 2598 referenced to SEQ ID NO: 50. In some embodiments, the nucleic acid molecule encoding a Rcg1 resistance allele has a haplotype comprising a single nucleotide polymorphism of “A” at position 3342 referenced to SEQ ID NO: 50.

[0779] In a related aspect is provided a maize plant comprising a resistance locus on chromosome 6 associated with anthracnose stalk rot resistance, but does not further comprise a resistance locus on chromosome 4, or a nucleic acid comprising sequence from the resistance locus on chromosome 4. The maize plant comprises one or more of the following nucleic acids:
[0780] i. a nucleotide sequence of SEQ ID NO: 209, 212, 215, 218, 221, 224, 227, 230, 233, 236, 239, 242, 245, 248, 251, 254, 257, 260, 263, 266 or 269, preferably of SEQ ID NO: 266 or 269, or
[0781] ii. a nucleotide sequence having a coding sequence of SEQ ID NO: 210, 213, 216, 219, 222, 225, 228, 231, 234, 237, 240, 243, 246, 249, 252, 255, 258, 261, 264, 267 or 270, preferably of SEQ ID NO: 267 or 270,
[0782] iii. a nucleotide sequence which is complementary to a sequence from i. or ii.,
[0783] iv. a nucleotide sequence which has at least 80% or 85%, preferably at least 90%, 91%, 92%, 93%, 94% or 95%, more preferably at least 96%, 97%, 98% or 99% identity with a sequence from i., ii. or iii.,
[0784] v. a nucleotide sequence which differs from a nucleic acid sequence according to i., ii. or iii. depending on the degeneracy of the genetic code,
[0785] vi. a nucleotide sequence which hybridizes with a nucleic acid sequence according to i., ii. or iii. under stringent conditions,
[0786] vii. a nucleotide sequence which encodes for a protein comprising the sequence of SEQ ID NO: 211, 214, 217, 220, 223, 226, 229, 232, 235, 238, 241, 244, 247, 250, 253, 256, 259, 262, 265, 268 or 271, preferably 268 or 271,
[0787] viii. a nucleotide sequence which encodes for a protein which has at least 80% or 8500, preferably at least 90%, 91%, 92%, 93%, 94% or 95%, more preferably at least 96%, 97%, 98% or 99% identity with a sequence of SEQ ID NOs: 211, 214, 217, 220, 223, 226, 229, 232, 235, 238, 241, 244, 247, 250, 253, 256, 259, 262, 265, 268 or 271, preferably 268 or 271.

[0788] Alternatively, the maize plant comprises one or more of the following nucleic acids:
[0789] i. a nucleotide sequence of SEQ ID NO: 1, 20, 23, 44 or 47,
[0790] ii. a nucleotide sequence which is complementary to a sequence from (i),
[0791] iii. a nucleotide sequence which has at least 80% or 85%, preferably at least 90%, 91%, 92%, 93%, 94% or 95%, more preferably at least 96%, 97%, 98% or 99% identity with a sequence from (i) or (ii),
[0792] iv. a nucleotide sequence which differs from a nucleic acid sequence according to (i), (ii) or (iii) depending on the degeneracy of the genetic code,
[0793] v. a nucleotide sequence which hybridizes with a nucleic acid sequence according to i., ii. or iii. under stringent conditions,
[0794] vi. a nucleotide sequence which encodes for a protein comprising the sequence of SEQ ID NO: 11-19, 22, 34-43, 46 or 49,
[0795] vii. a nucleotide sequence which encodes for a protein which has at least 80% or 85%, preferably at least 90%, 91%, 92%, 93%, 94% or 95%, more preferably at least 96%, 97%, 98% or 99% identity with a sequence of SEQ ID NOs: 11-19, 22, 34-43, 46 or 49.

[0796] In various embodiments, the nucleic acid molecule does not produce the amplicon according to SEQ ID NO: 119 upon polymerase chain reaction amplification by means of primers of SEQ ID NO: 120 and 121, primers of SEQ ID NO: 122 and 123, or primers of SEQ ID NO: 124 and 125.

[0797] In various embodiments, the nucleic acid molecule does not produce an amplicon selected from the group consisting of SEQ ID NOs: 94, 101, 106, 109, and 114 upon polymerase chain reaction amplification by means of primers of SEQ ID NOs: 95 and 96, primers of SEQ ID NOs: 97 and 98, primers of SEQ ID NOs: 99 and 100, primers of SEQ ID NOs: 101 and 102, primers of SEQ ID NOs: 103 and 104, primers of SEQ ID NOs: 105 and 106, primers of SEQ ID NOs: 107 and 108, primers of SEQ ID NOs: 109 and 110, primers of SEQ ID NOs: 111 and 112, primers of SEQ ID NOs: 113 and 114, primers of SEQ ID NOs: 115 and 116, or primers of SEQ ID NOs: 117 and 118.

[0798] In another aspect is provided a maize plant comprising two resistance loci associated with anthracnose stalk rot resistance, wherein one resistance locus is located on chromosome 6, and wherein the other the resistance locus is located on chromosome 4. The maize plant comprises one or more of the following nucleic acids:
[0799] i. a nucleotide sequence of SEQ ID NO: 209, 212, 215, 218, 221, 224, 227, 230, 233, 236, 239, 242, 245, 248, 251, 254, 257, 260, 263, 266 or 269, preferably of SEQ ID NO: 266 or 269,
[0800] ii. a nucleotide sequence having a coding sequence of SEQ ID NO: 210, 213, 216, 219, 222, 225, 228, 231, 234, 237, 240, 243, 246, 249, 252, 255, 258, 261, 264, 267 or 270, preferably of SEQ ID NO: 267 or 270,
[0801] iii. a nucleotide sequence which is complementary to a sequence from i. or ii.,
[0802] iv. a nucleotide sequence which has at least 80% or 85%, preferably at least 90%, 91%, 92%, 93%, 94% or 95%, more preferably at least 96%, 97%, 98% or 99% identity with a sequence from i. or ii.,
[0803] v. a nucleotide sequence which differs from a nucleic acid sequence according to i., ii. or iii. depending on the degeneracy of the genetic code,
[0804] vi. a nucleotide sequence which hybridizes with a nucleic acid sequence according to i., ii. or iii. under stringent conditions,
[0805] vii. a nucleotide sequence which encodes for a protein comprising the sequence of SEQ ID NO: 211, 214, 217, 220, 223, 226, 229, 232, 235, 238, 241, 244, 247, 250, 253, 256, 259, 262, 265, 268 or 271, preferably SEQ ID NO: 268 or 271,
[0806] viii. a nucleotide sequence which encodes for a protein which has at least 80% or 85%, preferably at least 90%, 91%, 92%, 93%, 94% or 95%, more preferably at least 96%, 97%, 98% or 99% identity with a sequence of SEQ ID NOs: 211, 214, 217, 220, 223, 226, 229, 232, 235, 238, 241, 244, 247, 250, 253, 256, 259, 262, 265, 268 or 271, preferably SEQ ID NO: 268 or 271.

[0807] The maize plant also comprises a nucleic acid molecule encoding an anthracnose stalk rot resistance allele having a haplotype comprising one or more nucleotide polymorphism selected from the group consisting of:
[0808] an “A” at position 132836954 on chromosome 6 referenced to B73AGPv04, preferably detectable by marker sequence of SEQ ID NO: 273,
[0809] a “T” at position 132836944 on chromosome 6 referenced to B73AGPv04, preferably detectable by marker sequence of SEQ ID NO: 274,
[0810] an “A” at position 132836869 on chromosome 6 referenced to B73AGPv04, preferably detectable by marker sequence of SEQ ID NO: 275,
[0811] a “T” at position 132836849 on chromosome 6 referenced to B73AGPv04, preferably detectable by marker sequence of SEQ ID NO: 276,
[0812] a “T” at position 132836845 on chromosome 6 referenced to B73AGPv04, preferably detectable by marker sequence of SEQ ID NO: 277,
[0813] a “G” at position 132836840 on chromosome 6 referenced to B73AGPv04, preferably detectable by marker sequence of SEQ ID NO: 278,
[0814] a “T” at position 132836830 on chromosome 6 referenced to B73AGPv04, preferably detectable by marker sequence of SEQ ID NO: 279,
[0815] an “A” at position 132836810 on chromosome 6 referenced to B73AGPv04, preferably detectable by marker sequence of SEQ ID NO: 280,
[0816] a “CA” at position 132836805 on chromosome 6 referenced to B73AGPv04, preferably detectable by marker sequence of SEQ ID NO: 281 and/or 282,
[0817] a deletion of “ATC” at position 132836802 on chromosome 6 referenced to B73AGPv04, preferably detectable by marker sequence of SEQ ID NO: 283 and/or 284,
[0818] a deletion of “ATT” at position 132836799 on chromosome 6 referenced to B73AGPv04, preferably detectable by marker sequence of SEQ ID NO: 283 and/or 284,
[0819] an “A” at position 132836791 on chromosome 6 referenced to B73AGPv04, preferably detectable by marker sequence of SEQ ID NO: 285,
[0820] a “CTG” at position 132836787 on chromosome 6 referenced to B73AGPv04, preferably detectable by marker sequence of SEQ ID NO: 286 and/or 287,
[0821] a “GA” at position 132836781 on chromosome 6 referenced to B73AGPv04, preferably detectable by marker sequence of SEQ ID NO: 288 and/or 289,
[0822] a “T” at position 132836776 on chromosome 6 referenced to B73AGPv04, preferably detectable by marker sequence of SEQ ID NO: 290,
[0823] a “AG” at position 132836767 on chromosome 6 referenced to B73AGPv04, preferably detectable by marker sequence of SEQ ID NO: 291 and/or 292,
[0824] an “A” at position 132836762 on chromosome 6 referenced to B73AGPv04, preferably detectable by marker sequence of SEQ ID NO: 293,
[0825] an insertion of “CGCCAA” and an “A” at position 132836679 on chromosome 6 referenced to B73AGPv04, preferably detectable by marker sequence of SEQ ID NO: 294 and/or 295,
[0826] an “A” at position 132836678 on chromosome 6 referenced to B73AGPv04, preferably detectable by marker sequence of SEQ ID NO: 296,
[0827] a “G” at position 132836670 on chromosome 6 referenced to B73AGPv04, preferably detectable by marker sequence of SEQ ID NO: 297,
[0828] a “T” at position 132836667 on chromosome 6 referenced to B73AGPv04, preferably detectable by marker sequence of SEQ ID NO: 298,
[0829] an “A” at position 132836665 on chromosome 6 referenced to B73AGPv04, preferably detectable by marker sequence of SEQ ID NO: 299,
[0830] a “C” at position 132836662 on chromosome 6 referenced to B73AGPv04, preferably detectable by marker sequence of SEQ ID NO: 300,
[0831] a “T” at position 132836660 on chromosome 6 referenced to B73AGPv04, preferably detectable by marker sequence of SEQ ID NO: 301,
[0832] a “G” at position 132836651 on chromosome 6 referenced to B73AGPv04, preferably detectable by marker sequence of SEQ ID NO: 302,
[0833] a deletion of “AAT” at position 132836643 on chromosome 6 referenced to B73AGPv04, preferably detectable by marker sequence of SEQ ID NO: 303 and/or 304,
[0834] a deletion of “GCCATG” at position 132836636 on chromosome 6 referenced to B73AGPv04, preferably detectable by marker sequence of SEQ ID NO: 305 and/or 306,
[0835] a “AG” at position 132836622 on chromosome 6 referenced to B73AGPv04, preferably detectable by marker sequence of SEQ ID NO: 307 and/or 308,
[0836] a “AC” at position 132836620 on chromosome 6 referenced to B73AGPv04, preferably detectable by marker sequence of SEQ ID NO: 309 and/or 310,
[0837] a “G” at position 132836612 on chromosome 6 referenced to B73AGPv04, preferably detectable by marker sequence of SEQ ID NO: 311,
[0838] a “G” at position 132836603 on chromosome 6 referenced to B73AGPv04, preferably detectable by marker sequence of SEQ ID NO: 312,
[0839] a “C” at position 132836591 on chromosome 6 referenced to B73AGPv04, preferably detectable by marker sequence of SEQ ID NO: 313,
[0840] an “A” at position 132836586 on chromosome 6 referenced to B73AGPv04, preferably detectable by marker sequence of SEQ ID NO: 314,
[0841] a “G” at position 132836580 on chromosome 6 referenced to B73AGPv04, preferably detectable by marker sequence of SEQ ID NO: 315,
[0842] an “A” at position 132836069 on chromosome 6 referenced to B73AGPv04, preferably detectable by marker sequence of SEQ ID NO: 316,
[0843] an “A” at position 132836063 on chromosome 6 referenced to B73AGPv04, preferably detectable by marker sequence of SEQ ID NO: 317,
[0844] a “G” at position 132836061 on chromosome 6 referenced to B73AGPv04, preferably detectable by marker sequence of SEQ ID NO: 318,
[0845] a “G” at position 132836056 on chromosome 6 referenced to B73AGPv04, preferably detectable by marker sequence of SEQ ID NO: 319,
[0846] a “C” at position 132836050 on chromosome 6 referenced to B73AGPv04, preferably detectable by marker sequence of SEQ ID NO: 320,
[0847] a “CGT” at position 132836047 on chromosome 6 referenced to B73AGPv04, preferably detectable by marker sequence of SEQ ID NO: 321 and/or 322,
[0848] a “G” at position 132836034 on chromosome 6 referenced to B73AGPv04, preferably detectable by marker sequence of SEQ ID NO: 323,
[0849] a “G” at position 132836031 on chromosome 6 referenced to B73AGPv04, preferably detectable by marker sequence of SEQ ID NO: 324,
[0850] a “T” at position 132836019 on chromosome 6 referenced to B73AGPv04, preferably detectable by marker sequence of SEQ ID NO: 325,
[0851] a “G” at position 132836008 on chromosome 6 referenced to B73AGPv04, preferably detectable by marker sequence of SEQ ID NO: 326,
[0852] a “G” at position 132835978 on chromosome 6 referenced to B73AGPv04, preferably detectable by marker sequence of SEQ ID NO: 327,
[0853] a “G” at position 132835910 on chromosome 6 referenced to B73AGPv04, preferably detectable by marker sequence of SEQ ID NO: 328,
[0854] a “G” at position 132835851 on chromosome 6 referenced to B73AGPv04, preferably detectable by marker sequence of SEQ ID NO: 329,
[0855] a “C” at position 132835819 on chromosome 6 referenced to B73AGPv04, preferably detectable by marker sequence of SEQ ID NO: 330,
[0856] a “G” at position 132835803 on chromosome 6 referenced to B73AGPv04, preferably detectable by marker sequence of SEQ ID NO: 331,
[0857] a “T” at position 132835793 on chromosome 6 referenced to B73AGPv04, preferably detectable by marker sequence of SEQ ID NO: 332,
[0858] a “C” at position 132835788 on chromosome 6 referenced to B73AGPv04, preferably detectable by marker sequence of SEQ ID NO: 333,
[0859] an “A” at position 132835781 on chromosome 6 referenced to B73AGPv04, preferably detectable by marker sequence of SEQ ID NO: 334,
[0860] an “A” at position 132835779 on chromosome 6 referenced to B73AGPv04, preferably detectable by marker sequence of SEQ ID NO: 335,
[0861] a “T” at position 132835776 on chromosome 6 referenced to B73AGPv04, preferably detectable by marker sequence of SEQ ID NO: 336,
[0862] a “G” at position 132835746 on chromosome 6 referenced to B73AGPv04, preferably detectable by marker sequence of SEQ ID NO: 337,
[0863] an “A” at position 132835729 on chromosome 6 referenced to B73AGPv04, preferably detectable by marker sequence of SEQ ID NO: 338,
[0864] a “C” at position 132835728 on chromosome 6 referenced to B73AGPv04, preferably detectable by marker sequence of SEQ ID NO: 339,
[0865] an insertion of “GACATC” at position 132835722 on chromosome 6 referenced to B73AGPv04, preferably detectable by marker sequence of SEQ ID NO: 340 and/or 341,
[0866] a “T” at position 132835713 on chromosome 6 referenced to B73AGPv04, preferably detectable by marker sequence of SEQ ID NO: 342,
[0867] a deletion of “GAA” at position 132835708 on chromosome 6 referenced to B73AGPv04, preferably detectable by marker sequence of SEQ ID NO: 343 and/or 344,
[0868] a deletion of “ATA” at position 132835705 on chromosome 6 referenced to B73AGPv04, preferably detectable by marker sequence of SEQ ID NO: 343 and/or 344,
[0869] a deletion of “GAT” at position 132835702 on chromosome 6 referenced to B73AGPv04, preferably detectable by marker sequence of SEQ ID NO: 343 and/or 344,
[0870] a “G” at position 132835693 on chromosome 6 referenced to B73AGPv04, preferably detectable by marker sequence of SEQ ID NO: 345,
[0871] a “T” at position 132835681 on chromosome 6 referenced to B73AGPv04, preferably detectable by marker sequence of SEQ ID NO: 346,
[0872] a “C” at position 132835671 on chromosome 6 referenced to B73AGPv04, preferably detectable by marker sequence of SEQ ID NO: 347,
[0873] a “T” at position 132835666 on chromosome 6 referenced to B73AGPv04, preferably detectable by marker sequence of SEQ ID NO: 348,
[0874] an “A” at position 132835271 on chromosome 6 referenced to B73AGPv04, preferably detectable by marker sequence of SEQ ID NO: 349,
[0875] a “GG” at position 132835267 on chromosome 6 referenced to B73AGPv04, preferably detectable by marker sequence of SEQ ID NO: 350 and/or 351,
[0876] a “T” at position 132835147 on chromosome 6 referenced to B73AGPv04, preferably detectable by marker sequence of SEQ ID NO: 352,
[0877] a “C” at position 132835031 on chromosome 6 referenced to B73AGPv04, preferably detectable by marker sequence of SEQ ID NO: 353,
[0878] an “A” at position 132834960 on chromosome 6 referenced to B73AGPv04, preferably detectable by marker sequence of SEQ ID NO: 354,
[0879] an “A” at position 132834951 on chromosome 6 referenced to B73AGPv04, preferably detectable by marker sequence of SEQ ID NO: 355,
[0880] a “AC” at position 132834946 on chromosome 6 referenced to B73AGPv04, preferably detectable by marker sequence of SEQ ID NO: 356 and/or 357,
[0881] an “A” at position 132834942 on chromosome 6 referenced to B73AGPv04, preferably detectable by marker sequence of SEQ ID NO: 358,
[0882] an “A” at position 132834929 on chromosome 6 referenced to B73AGPv04, preferably detectable by marker sequence of SEQ ID NO: 359,
[0883] a “T” at position 132834927 on chromosome 6 referenced to B73AGPv04, preferably detectable by marker sequence of SEQ ID NO: 360,
[0884] an “A” at position 132834924 on chromosome 6 referenced to B73AGPv04, preferably detectable by marker sequence of SEQ ID NO: 361,
[0885] a “C” at position 132834919 on chromosome 6 referenced to B73AGPv04, preferably detectable by marker sequence of SEQ ID NO: 362,
[0886] a “T” at position 132834908 on chromosome 6 referenced to B73AGPv04, preferably detectable by marker sequence of SEQ ID NO: 363,
[0887] an “A” at position 132834899 on chromosome 6 referenced to B73AGPv04, preferably detectable by marker sequence of SEQ ID NO: 364,
[0888] a “C” at position 132834754 on chromosome 6 referenced to B73AGPv04, preferably detectable by marker sequence of SEQ ID NO: 365,
[0889] a “C” at position 132834753 on chromosome 6 referenced to B73AGPv04, preferably detectable by marker sequence of SEQ ID NO: 366,
[0890] a “C” at position 132834748 on chromosome 6 referenced to B73AGPv04, preferably detectable by marker sequence of SEQ ID NO: 367,
[0891] an “A” at position 132834721 on chromosome 6 referenced to B73AGPv04, preferably detectable by marker sequence of SEQ ID NO: 368,
[0892] an “A” at position 132834632 on chromosome 6 referenced to B73AGPv04, preferably detectable by marker sequence of SEQ ID NO: 369,
[0893] a “C” at position 132834622 on chromosome 6 referenced to B73AGPv04, preferably detectable by marker sequence of SEQ ID NO: 370,
[0894] a “G” at position 132834615 on chromosome 6 referenced to B73AGPv04, preferably detectable by marker sequence of SEQ ID NO: 371,
[0895] a “C” at position 132834602 on chromosome 6 referenced to B73AGPv04,
[0896] a “G” at position 132834589 on chromosome 6 referenced to B73AGPv04, preferably detectable by marker sequence of SEQ ID NO: 372,
[0897] a “T” at position 132834581 on chromosome 6 referenced to B73AGPv04, preferably detectable by marker sequence of SEQ ID NO: 373,
[0898] an “A” at position 132834577 on chromosome 6 referenced to B73AGPv04, preferably detectable by marker sequence of SEQ ID NO: 374,
[0899] a “G” at position 132834569 on chromosome 6 referenced to B73AGPv04, preferably detectable by marker sequence of SEQ ID NO: 375,
[0900] a “C” at position 132834539 on chromosome 6 referenced to B73AGPv04, preferably detectable by marker sequence of SEQ ID NO: 376,
[0901] a “GAG” at position 132834532 on chromosome 6 referenced to B73AGPv04, preferably detectable by marker sequence of SEQ ID NO: 377 and/or 378,
[0902] a “T” at position 132834494 on chromosome 6 referenced to B73AGPv04, preferably detectable by marker sequence of SEQ ID NO: 379,
[0903] a “T” at position 132834431 on chromosome 6 referenced to B73AGPv04, preferably detectable by marker sequence of SEQ ID NO: 380,
[0904] a “G” at position 132834389 on chromosome 6 referenced to B73AGPv04, preferably detectable by marker sequence of SEQ ID NO: 381,
[0905] a “T” at position 132834208 on chromosome 6 referenced to B73AGPv04, preferably detectable by marker sequence of SEQ ID NO: 382,
[0906] a “T” at position 132831963 on chromosome 6 referenced to B73AGPv04, preferably detectable by marker sequence of SEQ ID NO: 383,
[0907] a “G” at position 132831924 on chromosome 6 referenced to B73AGPv04, preferably detectable by marker sequence of SEQ ID NO: 384,
[0908] an “A” at position 132831915 on chromosome 6 referenced to B73AGPv04, preferably detectable by marker sequence of SEQ ID NO: 385,
[0909] a “G” at position 132831839 on chromosome 6 referenced to B73AGPv04, preferably detectable by marker sequence of SEQ ID NO: 386,
[0910] a “T” at position 132829096 on chromosome 6 referenced to B73AGPv04, preferably detectable by marker sequence of SEQ ID NO: 387,
[0911] an “A” at position 132828997 on chromosome 6 referenced to B73AGPv04, preferably detectable by marker sequence of SEQ ID NO: 388,
[0912] a “G” at position 132828958 on chromosome 6 referenced to B73AGPv04, preferably detectable by marker sequence of SEQ ID NO: 389,
[0913] a “G” at position 132828950 on chromosome 6 referenced to B73AGPv04, preferably detectable by marker sequence of SEQ ID NO: 390,
[0914] a “C” at position 132828867 on chromosome 6 referenced to B73AGPv04, preferably detectable by marker sequence of SEQ ID NO: 391,
[0915] an “A” at position 132827606 on chromosome 6 referenced to B73AGPv04, preferably detectable by marker sequence of SEQ ID NO: 392,
[0916] an insertion of “AGTTCATAATAAAGTGATAGAGTT” (SEQ ID NO: 414) at position 132827596 on chromosome 6 referenced to B73AGPv04, preferably detectable by marker sequence of SEQ ID NO: 393 and/or 394,
[0917] a “T” at position 132827573 on chromosome 6 referenced to B73AGPv04, preferably detectable by marker sequence of SEQ ID NO: 395,
[0918] a “G” at position 132827566 on chromosome 6 referenced to B73AGPv04, preferably detectable by marker sequence of SEQ ID NO: 396,
[0919] an “A” at position 132827549 on chromosome 6 referenced to B73AGPv04, preferably detectable by marker sequence of SEQ ID NO: 397,
[0920] a “TAT” at position 132827545 on chromosome 6 referenced to B73AGPv04, preferably detectable by marker sequence of SEQ ID NO: 398 and/or 399,
[0921] a “C” at position 132827302 on chromosome 6 referenced to B73AGPv04, preferably detectable by marker sequence of SEQ ID NO: 400,
[0922] a “T” at position 132826983 on chromosome 6 referenced to B73AGPv04, preferably detectable by marker sequence of SEQ ID NO: 401,
[0923] a “T” at position 132826940 on chromosome 6 referenced to B73AGPv04, preferably detectable by marker sequence of SEQ ID NO: 402,
[0924] a “T” at position 1333040380 on chromosome 6 referenced to B73AGPv04, preferably detectable by marker sequence of SEQ ID NO: 403,
[0925] a “C” at position 1333040382 on chromosome 6 referenced to B73AGPv04, preferably detectable by marker sequence of SEQ ID NO: 404, or
[0926] a “T” at position 133040760 on chromosome 6 referenced to B73AGPv04, preferably detectable by marker sequence of SEQ ID NO: 405.

[0927] Alternatively the maize plant comprises one or more of the following nucleic acids:
[0928] i. a nucleotide sequence of SEQ ID NO: 1, 20, 23, 44 or 47,
[0929] ii. a nucleotide sequence which is complementary to a sequence from (i),
[0930] iii. a nucleotide sequence which has at least 80% or 85%, preferably at least 90%, 91%, 92%, 93%, 94% or 95%, more preferably at least 96%, 97%, 98% or 99% identity with a sequence from (i) or (ii),
[0931] iv. a nucleotide sequence which differs from a nucleic acid sequence according to (i), (ii) or (iii) depending on the degeneracy of the genetic code,
[0932] v. a nucleotide sequence which hybridizes with a nucleic acid sequence according to i., ii. or iii. under stringent conditions,
[0933] vi. a nucleotide sequence which encodes for a protein comprising the sequence of SEQ ID NO: 11-19, 22, 34-43, 46 or 49,
[0934] vii. a nucleotide sequence which encodes for a protein which has at least 80% or 8500, preferably at least 90%, 91%, 92%, 93%, 94% or 95%, more preferably at least 96%, 97%, 98% or 99% identity with a sequence of SEQ ID NOs: 11-19, 22, 34-43, 46 or 49.

[0935] The maize plant also comprises a nucleic acid molecule encoding a Rcg1 resistance allele having a haplotype comprising one or more nucleotide polymorphism selected from the group consisting of:
[0936] i. a “C” at position 413 referenced to SEQ ID NO: 50,
[0937] ii. a “C” at position 958 referenced to SEQ ID NO: 50,
[0938] iii. a “C” at position 971 referenced to SEQ ID NO: 50,
[0939] iv. a “T” at position 1099 referenced to SEQ ID NO: 50,
[0940] v. an “A” at position 1154 referenced to SEQ ID NO: 50,
[0941] vi. a “T” at position 1250 referenced to SEQ ID NO: 50,
[0942] vii. a “G” at position 1607 referenced to SEQ ID NO: 50,
[0943] viii. a “G” at position 2001 referenced to SEQ ID NO: 50,
[0944] ix. an “A” at position 2598 referenced to SEQ ID NO: 50, and
[0945] x. an “A” at position 3342 referenced to SEQ ID NO: 50.

[0946] Also provided are seeds or plant parts of any of the above maize plants.

### Introgression

[0947] When a gene is introgressed by marker-assisted selection, it is not only the gene that is introduced but also the flanking regions (Gepts, Crop Sci, 2002, 42: 1780-1790). This is referred to as “linkage drag.” In the case where the donor plant is highly unrelated to the recipient plant, as in the case of the Rcg1 locus being introgressed from MP305, an exotic source, into elite inbreds, these flanking regions carry additional genes that may code for agronomically undesirable traits. This “linkage drag” may also result in reduced yield or other negative agronomic characteristics even after multiple cycles of backcrossing into the elite corn line. This is also sometimes referred to as “yield drag.” The size of the flanking region can be decreased by additional backcrossing, although this is not always successful, as breeders do not have control over the size of the region or the recombination breakpoints (Young et al., Genetics, 1998, 120:579-585). In classical breeding it is usually only by chance that recombinations are selected that contribute to a reduction in the size of the donor segment (Tanksley et al., Biotechnology, 1989, 7: 257-264). Even after 20 backcrosses in backcrosses of this type, one may expect to find a sizeable piece of the donor chromosome still linked to the gene being selected. With markers however, it is possible to select those rare individuals that have experienced recombination near the gene of interest. In 150 backcross plants, there is a 95% chance that at least one plant will have experienced a crossover within 1 cM of the gene, based on a single meiosis map distance. Markers will allow unequivocal identification of those individuals. With one additional backcross of 300 plants, there would be a 95% chance of a crossover within 1 cM single meiosis map distance of the other side of the gene, generating a segment around the target gene of less than 2 cM based on a single meiosis map distance. This can be accomplished in two generations with markers, while it would have required on average 100 generations without markers. When the exact location of a gene is known, a series of flanking markers surrounding the gene can be utilized to select for recombinations in different population sizes. For example, in smaller population sizes recombinations may be expected further away from the gene, so more distal flanking markers would be required to detect the recombination.

[0948] In one aspect is provided a method of introgressing a locus associated with anthracnose stalk rot resistance into a maize plant the method comprising:
[0949] a. screening a population with at least one marker to determine if one or more maize plants from the population comprises the locus associated with anthracnose stalk rot resistance, wherein the screening comprises a nucleic acid assay for the detection of at least one marker at a resistance locus on chromosome 6, wherein the resistance locus comprises an anthracnose stalk rot resistance allele having a haplotype comprising one or more nucleotide polymorphism selected from the group consisting of variant nucleotides of Table 13, and/or a nucleic acid assay for the detection of at least one marker at a resistance locus on chromosome 4, wherein the resistance locus comprises a Rcg1 resistance allele having a haplotype comprising one or more nucleotide polymorphism selected from the group consisting of:
[0950] a “C” at position 413 referenced to SEQ ID NO: 50,
[0951] a “C” at position 958 referenced to SEQ ID NO: 50,
[0952] a “C” at position 971 referenced to SEQ ID NO: 50,
[0953] a “T” at position 1099 referenced to SEQ ID NO: 50,
[0954] an “A” at position 1154 referenced to SEQ ID NO: 50,
[0955] a “T” at position 1250 referenced to SEQ ID NO: 50,
[0956] a “G” at position 1607 referenced to SEQ ID NO: 50,
[0957] a “G” at position 2001 referenced to SEQ ID NO: 50,
[0958] an “A” at position 2598 referenced to SEQ ID NO: 50, and
[0959] an “A” at position 3342 referenced to SEQ ID NO: 50; and
[0960] b. selecting from the population at least one maize plant comprising said locus associated with anthracnose stalk rot resistance; and
[0961] c. crossing the at least one maize plant to a second maize plant;
[0962] d. evaluating progeny plants for the at least one marker associated with anthracnose stalk rot resistance; and
[0963] e. selecting progeny plants possessing the allele associated with anthracnose stalk rot resistance.

[0964] In some embodiments, the one or more nucleotide polymorphisms are selected from the group consisting of:

[0965] an “A” at position 132836954 on chromosome 6, a “T” at position 132836944 on chromosome 6, an “A” at position 132836869 on chromosome 6, a “T” at position 132836849 on chromosome 6, a “T” at position 132836845 on chromosome 6, a “G” at position 132836840 on chromosome 6, a “T” at position 132836830 on chromosome 6, an “A” at position 132836810 on chromosome 6, a “CA” at position 132836805 on chromosome 6, a deletion of “ATC” at position 132836802 on chromosome 6, a deletion of “ATT” at position 132836799 on chromosome 6, an “A” at position 132836791 on chromosome 6, a “CTG” at position 132836787 on chromosome 6, a “GA” at position 132836781 on chromosome 6, a “T” at position 132836776 on chromosome 6, a “AG” at position 132836767 on chromosome 6, an “A” at position 132836762 on chromosome 6, an insertion of “CGCCAA” and an “A” at position 132836679 on chromosome 6, an “A” at position 132836678 on chromosome 6, a “G” at position 132836670 on chromosome 6, a “T” at position 132836667 on chromosome 6, an “A” at position 132836665 on chromosome 6, a “C” at position 132836662 on chromosome 6, a “T” at position 132836660 on chromosome 6, a “G” at position 132836651 on chromosome 6, a deletion of “AAT” at position 132836643 on chromosome 6, a deletion of “GCCATG” at position 132836636 on chromosome 6, a “AG” at position 132836622 on chromosome 6, a “AC” at position 132836620 on chromosome 6, a “G” at position 132836612 on chromosome 6, a “G” at position 132836603 on chromosome 6, a “C” at position 132836591 on chromosome 6, an “A” at position 132836586 on chromosome 6, a “G” at position 132836580 on chromosome 6, an “A” at position 132836069 on chromosome 6, an “A” at position 132836063 on chromosome 6, a “G” at position 132836061 on chromosome 6, a “G” at position 132836056 on chromosome 6, a “C” at position 132836050 on chromosome 6, a “CGT” at position 132836047 on chromosome 6, a “G” at position 132836034 on chromosome 6, a “G” at position 132836031 on chromosome 6, a “T” at position 132836019 on chromosome 6, a “G” at position 132836008 on chromosome 6, a “G” at position 132835978 on chromosome 6, a “G” at position 132835910 on chromosome 6, a “G” at position 132835851 on chromosome 6, a “C” at position 132835819 on chromosome 6, a “G” at position 132835803 on chromosome 6, a “T” at position 132835793 on chromosome 6, a “C” at position 132835788 on chromosome 6, an “A” at position 132835781 on chromosome 6, an “A” at position 132835779 on chromosome 6, a “T” at position 132835776 on chromosome 6, a “G” at position 132835746 on chromosome 6, an “A” at position 132835729 on chromosome 6, a “C” at position 132835728 on chromosome 6, an insertion of “GACATC” at position 132835722 on chromosome 6, a “T” at position 132835713 on chromosome 6, a deletion of “GAA” at position 132835708 on chromosome 6, a deletion of “ATA” at position 132835705 on chromosome 6, a deletion of “GAT” at position 132835702 on chromosome 6, a “G” at position 132835693 on chromosome 6, a “T” at position 132835681 on chromosome 6, a “C” at position 132835671 on chromosome 6, a “T” at position 132835666 on chromosome 6, an “A” at position 132835271 on chromosome 6, a “GG” at position 132835267 on chromosome 6, a “T” at position 132835147 on chromosome 6, a “C” at position 132835031 on chromosome 6, an “A” at position 132834960 on chromosome 6, an “A” at position 132834951 on chromosome 6, a “AC” at position 132834946 on chromosome 6, an “A” at position 132834942 on chromosome 6, an “A” at position 132834929 on chromosome 6, a “T” at position 132834927 on chromosome 6, an “A” at position 132834924 on chromosome 6, a “C” at position 132834919 on chromosome 6, a “T” at position 132834908 on chromosome 6, an “A” at position 132834899 on chromosome 6, a “C” at position 132834754 on chromosome 6, a “C” at position 132834753 on chromosome 6, a “C” at position 132834748 on chromosome 6, an “A” at position 132834721 on chromosome 6, an “A” at position 132834632 on chromosome 6, a “C” at position 132834622 on chromosome 6, a “G” at position 132834615 on chromosome 6, a “C” at position 132834602 on chromosome 6, a “G” at position 132834589 on chromosome 6, a “T” at position 132834581 on chromosome 6, an “A” at position 132834577 on chromosome 6, a “G” at position 132834569 on chromosome 6, a “C” at position 132834539 on chromosome 6, a “GAG” at position 132834532 on chromosome 6, a “T” at position 132834494 on chromosome 6, a “T” at position 132834431 on chromosome 6, a “G” at position 132834389 on chromosome 6, a “T” at position 132834208 on chromosome 6, a “T” at position 132831963 on chromosome 6, a “G” at position 132831924 on chromosome 6, an “A” at position 132831915 on chromosome 6, a “G” at position 132831839 on chromosome 6, a “T” at position 132829096 on chromosome 6, an “A” at position 132828997 on chromosome 6, a “G” at position 132828958 on chromosome 6, a “G” at position 132828950 on chromosome 6, a “C” at position 132828867 on chromosome 6, an “A” at position 132827606 on chromosome 6, an insertion of “AGTTCATAATAAAGTGATAGAGTT” (SEQ ID NO: 414) at position 132827596 on chromosome 6, a “T” at position 132827573 on chromosome 6, a “G” at position 132827566 on chromosome 6, an “A” at position 132827549 on chromosome 6, a “TAT” at position 132827545 on chromosome 6, a “C” at position 132827302 on chromosome 6, a “T” at position 132826983 on chromosome 6, a “T” at position 132826940 on chromosome 6, a “T” at position 1333040380 on chromosome 6, a “C” at position 1333040382 on chromosome 6, or a “T” at position 133040760 on chromosome 6, compared to the position on chromosome 6 of the B73AGPv04 reference genome sequence.

[0966] In various embodiments, the at least one marker used for screening is located within 5 cM of any one of the variant nucleotide polymorphisms recited in Table 13 and/or any one of the polymorphisms: “C” at position 413 referenced to SEQ ID NO: 50, a “C” at position 958 referenced to SEQ ID NO: 50, a “C” at position 971 referenced to SEQ ID NO: 50, a “T” at position 1099 referenced to SEQ ID NO: 50, an “A” at position 1154 referenced to SEQ ID NO: 50, a “T” at position 1250 referenced to SEQ ID NO: 50, a “G” at position 1607 referenced to SEQ ID NO: 50, a “G” at position 2001 referenced to SEQ ID NO: 50, an “A” at position 2598 referenced to SEQ ID NO: 50, or an “A” at position 3342 referenced to SEQ ID NO: 50.

[0967] In various embodiments, the at least one marker used for screening is located within 1 cM of any one of the variant nucleotide polymorphisms recited in Table 13 and/or any one of the polymorphisms: “C” at position 413 referenced to SEQ ID NO: 50, a “C” at position 958 referenced to SEQ ID NO: 50, a “C” at position 971 referenced to SEQ ID NO: 50, a “T” at position 1099 referenced to SEQ ID NO: 50, an “A” at position 1154 referenced to SEQ ID NO: 50, a “T” at position 1250 referenced to SEQ ID NO: 50, a “G” at position 1607 referenced to SEQ ID NO: 50, a “G” at position 2001 referenced to SEQ ID NO: 50, an “A” at position 2598 referenced to SEQ ID NO: 50, or an “A” at position 3342 referenced to SEQ ID NO: 50.

[0968] In various embodiments, the resistance locus on chromosome 4 is located on a chromosomal interval between makers PZE-104102206 and PZE-104132759. In various embodiments, the resistance locus on chromosome 6 is located on a chromosomal interval between makers PZE-106066805 and PZE-106075546. In various embodiments, the resistance locus on chromosome 6 is located on a chromosomal interval between 139646631 and 139889078 numbered according to the B73AGPv05 genome sequence. In various embodiments, the resistance locus of chromosome 6 comprises SEQ ID NO: 272, or a fragment thereof.

[0969] In various embodiments, the resistance locus on chromosome 4 does not produce an amplicon selected from the group consisting of SEQ ID NOs: 94, 101, 106, 109, and 114 upon polymerase chain reaction amplification by means of primers of SEQ ID NOs: 95 and 96, primers of SEQ ID NOs: 97 and 98, primers of SEQ ID NOs: 99 and 100, primers of SEQ ID NOs: 101 and 102, primers of SEQ ID NOs: 103 and 104, primers of SEQ ID NOs: 105 and 106, primers of SEQ ID NOs: 107 and 108, primers of SEQ ID NOs: 109 and 110, primers of SEQ ID NOs: 111 and 112, primers of SEQ ID NOs: 113 and 114, primers of SEQ ID NOs: 115 and 116, or primers of SEQ ID NOs: 117 and 118.

[0970] In various embodiments, the resistance locus on chromosome 4 is derived from NC262A or NC342. In various embodiments, the resistance locus on chromosome 6 is derived from NC262A.

### Stalk Splitter Apparatus

[0971] With respect to the various embodiments of selecting and breeding plants described herein, the plants may be assayed for stalk rot with the use of a stalk splitter apparatus (100). The stalk splitter apparatus can improve the speed and reproducibility of analyzing a corn plant for stalk rot. The stalk splitter apparatus can reproducibly split corn stalks in a manner to allow for improved quantitative analysis of the extent of stalk rot.

[0972] The stalk splitter apparatus comprises a body (101), preferably a metallic body, comprising a hole (102) configured to allow a corn stalk (200) to fit into the hole. The metallic body may be comprised of aluminum, steel, copper, or any other suitable metal. The metallic body may be made of a solid metal, such as solid aluminum. The hole may be placed in or near the center of the solid body.

[0973] The stalk splitter apparatus comprises a blade (103) positioned above the hole. The blade is of sufficient sharpness and strength so as to be able to split and/or open a corn stalk. In various embodiments, the blade is centered above the hole. In various embodiments, the blade is fixed by mounting elements (107). In various embodiments, the blade is positioned in direction of the shafts of the rollers (106) (as shown in FIG. 3, FIGS. 5 and 6) or perpendicularly to the shafts of the rollers (as shown in FIG. 4), any other direction which allows splitting and/or opening a corn stalk. In various embodiments, the blade is removable for sharpening.

[0974] The stalk splitter apparatus comprises two rollers (104) below the blade. The rollers are configured to apply compressive force to the stalk. The compressive force is able to center the stalk into the hole. The stalk splitter apparatus may then be able to cut stalks having variable diameter consistently in the middle. In various embodiments, one or both of the two rollers are tensioned by springs residing in channels drilled horizontally out from the center hole in the body of the splitter on either side of the rollers. In various embodiments, one or both of the two rollers have a concave running surface (108) and/or roughened to center the stalk into the hole and grip the stalk.

[0975] To cut a corn stalk, the stalk splitter is initially positioned above the corn stalk such that the top of the corn stalk fits into the hole. Application of downward force allows the stalk splitter to cut the corn stalk. As downward force is applied, the corn stalk moves upward through the hole such that the blade cuts into the center of the stalk.

[0976] The stalk splitter apparatus may comprise handles (105) extending from the outer top of the body (101) comprising the hole. The handles may extend up to a length of about 50 cm. The handles may have a length of about 35 cm, 40 cm, 45 cm, 50 cm, 55 cm, or 60 cm. The extended handles may enable a user to push down the stalk all the way through the apparatus to the ground while the user is standing.

### EXAMPLES

[0977] The present disclosure is also described and demonstrated by way of the following examples. However, the use of these and other examples anywhere in the specification is illustrative only and in no way limits the scope and meaning of the disclosure or of any exemplified term. Likewise, the disclosure is not limited to any particular preferred embodiments described here. Indeed, many modifications and variations of the disclosure may be apparent to those skilled in the art upon reading this specification, and such variations can be made without departing from the disclosure in spirit or in scope. The disclosure is therefore to be limited only by the terms of the appended claims along with the full scope of equivalents to which those claims are entitled.

### Example 1. Identification of Two Significant QTL Relevant to ASR

[0978] Hundreds of inbreds were screened for resistance to ASR by artificially infecting stalks with spores of the cultured fungi. The inoculum source was obtained from infected stalks in central Indiana. The inoculum source was purified and cultured on oatmeal agar media. Spores were harvested in 21 days, blended with water, and strained with cheesecloth. Concentrations were normalized to 6×10⁵ ml⁻¹. Plots were 3.3 meters long in rows 0.76 meters wide and replicated twice. Stalks were injected with 0.5 ml of inoculum into the first internode above the brace roots within a week after silking. A Socorex Dosys™ syringe was used whose 3.18 mm diameter needles had their tips filled and a 0.51 mm hole drilled laterally for side flow. Holes 3.97 mm in diameter were pre-drilled in the stalks with a cordless drill. Holes were covered with petroleum jelly after inoculation. Just after black layer maturity was reached, sections of stalks from the ear to the ground were cut off with branch loppers, bundled, barcoded and taken inside to be split with a bandsaw and rated.

[0979] The rating was composed of three scores. The first score is the intensity of infection at the inoculation site on a 1 to 9 scale, where 9 represents a completely rotted inoculated internode (lx weight). The second score is the number of nodes darkened more than 10%. The third score is the number of nodes darkened over 50%. A composite score was generated by weighting these scores 1:2:3, respectively. Inbred sources NC262A and NC342 were observed to be resistant for over four years with scores consistently below 10, while susceptible inbreds had scores above 32. Seeds of these inbreds were obtained from the National Genetic Resources Program maize repository at Iowa State (GRIN). They share the same parentage which traces to Coker 811A×C103⁴. These genotypes have not been previously reported to have resistance to ASR. They do not share parentage with known source Mp305. The molecular distinction from known sources is shown in Example 3 below.

[0980] A mapping population was generated from the cross NC262A×MN8. (MN8 is a moderately susceptible inbred.) The population was self-pollinated three times to produce a population with 310 F₂:S₂ families. These families were trialed in an augmented incomplete balanced block design for two years with two replications per year. Two inbreds with moderate ASR susceptibility served as the repeated checks in each sub-block. Inoculation and rating were performed as described above. Stalk rot composite scores for the two years as shown in Table 1 below, with higher values signifying more rot in the plant:

TABLE 1
Stalk Rot Composite Scores Over Two Years

| | |
|---|---|
| Mean | 15.77 |
| Min. | 5.15 |
| Max. | 32.21 |
| Var. | 19.19 |

P = 0.028, Passes the Cramer-Von Mises test for normality

[0981] A six-plant bulk of the lines was genotyped on an Affymetrix custom maize chip with 30,000 single nucleotide polymorphic loci (SNPs) queried. Composite interval analysis was performed using RQTL (QGene.org). See, Broman K W, Wu H, Sen Ś, Churchill G A (2003) R/qtl: QTL mapping in experimental crosses. Bioinformatics 19:889-890. Composite interval mapping revealed two highly significant QTL, as shown below in Table 2:

TABLE 2
Quantitative trait locus analysis results per R/qtl

| chromo- | Peak | Peak position | Left support | left 1.5 | Right support | Right 1.5 |
|---|---|---|---|---|---|---|
| some | Marker | (v2) | interval | LOD support | int. | LOD support |
| 4 | PZE- | 190,611,189 | 178,597,407 | PZE- | 216,244,367 | PZE- |
| | 104115065 | | | 104102206 | | 104132759 |
| 6 | PZE- | 119,641,655 | 119,158,886 | PZE- | 130,840,928 | PZE- |
| | 106066955 | | | 106066805 | | 106075546 |

| | Support | | | | | |
|---|---|---|---|---|---|---|
| chromo- | int. | Peak | | Est. | Est. | % vari- |
| some | (Mb) | LOD | p-value | (a) | (d) | ation |
| 4 | 37.6 | 7.8 | 1.32E−06 | −1.56 | −0.10 | 7.75 |
| 6 | 11.7 | 12.5 | 2.57E−12 | −2.17 | −0.88 | 16.02 |

[0982] Using these results, the progeny of five ASR resistant lines were selected that were heterozygous for the susceptible (MN8) allele on chromosome 4, and/or heterozygous in the support interval on chromosome 6. In this way, the effect of the chromosome 6 locus could be better isolated. These lines were chosen and self-pollinated to find additional recombination in the region and develop a fine map. S4 lines were assayed in the field with three replicates and six plants inoculated per replicate. Five plants per family were also self-pollinated to S5 for later use. 351 lines were tested for ASR resistance in three replicates and five to six plants per replicate, with an augmented incomplete balanced block design used.

[0983] Families in the tails of the distribution of stalk rot responses beyond approximately 1.5 of the standard deviation above and below the mean were contrasted for allelic frequency (NC262A SNP vs. MN8's). In those tails (43 lines in the resistant tail and 36 for the susceptible tail), the SNP locus with the highest contrast had a Chi-Squared deviation from the expected 1:1 ratio of 29.3 (P<0.0001) between 85.92 and 86.25 cM on the IBM4 map v2. These boundaries are between SNP markers Affx-90199961 and PZE-106073551, respectively.

[0984] The sequence of Affx-90199961 is:

(SEQ ID NO: 415)
ACACATACCACCTTGCTCTCTTCACGAGCTGAAATGCA
CAACCGAACAACGTTTTCCCGCCCATTTTTTTTTTTGT
TCTTCCAGCAGCGTCTTACCAACCNTATAACTGCAGAT
GTGTACAGGCGCGCATACTGACAGAGAGCGTAGAATGN
TACAGCAGTGTGGTCCTTTGTCGATTTTATATTAATTT
GTATGAC.

[0985] The sequence of PZE-106073551 is:

(SEQ ID NO: 416)
CTATTACCTCCACCAAAAGGGACGATACATGGCTCTCT
GTCCACCCGTCGTCATGTTTGCCCTATGCTCATGGCTC
ACCTACGTGCTCATCAAGAACTACNACCGCTCTCTTAA
TATCACCGTATTCATAACGGTCGTCTTGGCATTCCTGG
AGTTATACCAGCTCTACTTGTACATAGCCTCTGGTTGG
TTCAAGGTGGC.

[0986] The sequence of PZE-104115065 is:

(SEQ ID NO: 417)
TTTTGGTGATCTTCATCTGTTGCTACCAAAAAACAGTT
AAAAGACAAACA[T/C]GCTGCATATCTCAAAGTTTCA
AGGTTGGAGAAGTTCTTTCATGAACTGTC.

[0987] NC262A vs. MN8 alleles were also contrasted within families having at least 3 individuals. This was a powerful analysis with 137 such families. All 26 SNPs in the narrowed region were analyzed in a step-wise linear mixed model. SNPs were treated as fixed effects and families treated as random effects in the model:

Score=mean+SNP+family+residual

[0988] The result (Table 3) was almost the same as for the Chi-Square analysis involving the most resistant and susceptible tails. A highly significance interval extends from PZE.106072681 (P<1.25E-16) to PZE.106074560 (P<4.26E-14). Within this interval, the largest deviation from the expected 1:1 ratio was between ZmSYNBREED_54946_787 (P<2.10E-25) and ZmSYNBREED_54956_986 (P<1.58E-25).

TABLE 3
Results of Analysis with 137 such Families
in the Highly Significant Interval

| SNP marker name | Chisq | P value |
|---|---|---|
| PZE.106072681 | 68.53 | 1.25E−16 |
| PZE.106073001 | 74.68 | 5.53E−18 |
| PUT.163a.18167596.1294 | 79.51 | 4.81E−19 |
| ZmSYNBREED_54943_173 | 107.52 | 3.42E−25 |
| ZmSYNBREED_54946_787 | 108.48 | 2.10E−25 |
| PZE.106073260 | 108.48 | 2.10E−25 |
| ZmSYNBREED_54949_671 | 108.48 | 2.10E−25 |
| ZmSYNBREED_54956_986 | 109.05 | 1.58E−25 |
| PZE.106073551 | 105.03 | 1.20E−24 |
| ZmSYNBREED_54966_239 | 105.03 | 1.20E−24 |
| PZE.106073623 | 105.03 | 1.20E−24 |
| ZmSYNBREED_54969_202 | 105.03 | 1.20E−24 |
| ZmSYNBREED_54969_513 | 105.03 | 1.20E−24 |
| ZmSYNBREED_54973_806 | 105.69 | 8.60E−25 |
| ZmSYNBREED_54975_531 | 106.56 | 5.55E−25 |
| ZmSYNBREED_54977_728 | 93.08 | 5.01E−22 |
| ZmSYNBREED_54978_371 | 93.08 | 5.01E−22 |
| PZE.106074105 | 92.25 | 7.64E−22 |
| ZmSYNBREED_54980_496 | 92.25 | 7.64E−22 |
| ZmSYNBREED_54981_535 | 90.05 | 2.32E−21 |
| PZE.106074333 | 69.73 | 6.80E−17 |
| ZmSYNBREED_54987_542 | 68.80 | 1.09E−16 |
| PZE.106074560 | 57.05 | 4.26E−14 |

[0989] The S5 self-pollinated progeny of 132 families that were heterozygous for all or part of this interval for genotyping were then selected to identify additional recombination within this interval to further delineate the QTL location. 5,022 plants (plus parental checks) were genotyped with 14 gene rich KASP SNPs (LCG, Middlesex, UK) within this region. With the aid of PCR, KASP technology placed different fluors for each of the polymorphisms at the base queried.

[0990] Those plants that revealed recombination within the region were then phenotyped. Phenotyping was performed as described apart from the stalk splitting procedure.

[0991] Validation and further narrowing of the interval were then carried out using these results.

[0992] 90 S6 progeny of the above mapping phase, whose genotypes are homozygous in the region and showing past recombination, were selected. Their S5 progenitors had a range of phenotypes in the previous testing phase. These were phenotyped in three replicates of six plants each as follows. All of the plants were carefully inoculated in the lower stalk at flowering with 3×10⁵ Colletotrichum graminicola spores. They were then carefully split as described above at physiological maturity, followed by phenotypic scoring and rating on a 1 to 9 scale as described above. A score of 9 indicates no spreading of fungal growth, while a score of 1 indicates that the plant is completely rotted.

[0993] Also, 55 S6 lines that are heterozygous and having been recombined between various markers were chosen. These were phenotyped with 6 replicates of 6 inoculated plants each to account for the variability. The means of these were used for analyses. The means of the 3 allelic classes (AA, AB, and BB) were used for analyses, where A represents a segment from the resistant and B from the susceptible parent.

[0994] Orthogonal contrasts within families (near isolines) were inconclusive due to the lower level of replication. A more powerful analysis was undertaken in which all of the more resistant were compared with the more susceptible “tails” of the means. On the same 1 to 9 scale, a priori delimiters of stalk rot rating over 7 or under 5.5 were chosen because visually, these groups represent quite resistant (over 7) versus quite susceptible (under 5.5) sets. For stalk rot, rating at the R2 stage is optimal because rating at a later stage would result in some of the intermediate families presenting as fully susceptible.

[0995] The “tails” of S6 lines were contrasted marker by marker using Chi-Square analysis. Under Hardy-Weinberg equilibrium, if there is no marker-trait association, an equal frequency of alleles between the tails at each marker locus would be expected. Deviation from H-W Equilibrium suggests the presence of a linked resistance gene. The results are shown in Table 4 below.

TABLE 4
Chi-Square contrast analysis between divergent phenotype tails of mapping population S6 lines.

| | simplex marker | | | | | |
|---|---|---|---|---|---|---|
| | PZE-106073001 | PUT-163a-18167596-1294 | S_54943_173 | PZE-106073260 | S_54949_671 | PZE-106073330 |
| | position AGP v4 | | | | | |
| | 132527554 | 132569643 | 132618791 | 132727834 | 132805062 | 132828360 |
| Resistant | 21 | 20 | 21 | 21 | 21 | 21 |
| tail lines | | | | | | |
| R tail obs | 30 | 32 | 34 | 38 | 38 | 38 |
| (donor alleles) | | | | | | |
| R tail exp. | 21 | 20 | 21 | 21 | 21 | 21 |
| (if | | | | | | |
| independent) | | | | | | |
| S tail lines | 15 | 15 | 15 | 15 | 15 | 15 |
| S tail obs | 8 | 4 | 0 | 0 | 0 | 0 |
| (RP alleles) | | | | | | |
| S tail | 15 | 15 | 15 | 15 | 15 | 15 |
| expected | | | | | | |
| (R obs − R | 3.9 | 7.2 | 8.0 | 13.8 | 13.8 | 13.8 |
| exp)\hat{ }2/R exp | | | | | | |
| (S obs − S | 3.3 | 8.1 | 15.0 | 15.0 | 15.0 | 15.0 |
| exp)\hat{ }2/S exp | | | | | | |
| sum Chi-Sq | 7.1 | 15.3 | 23.0 | 28.8 | 28.8 | 28.8 |

| | simplex marker | | | | | |
|---|---|---|---|---|---|---|
| | S_54956_986 | PZE-106073551 | S_54966_239 | PZE-106073623 | S_54969_513 | S_54972_725 |
| | position AGP v4 | | | | | |
| | 133038790 | 133193926 | 133317185 | 133326430 | 133421165 | 133497579 |
| Resistant | 21 | 21 | 21 | 21 | 21 | 21 |
| tail lines | | | | | | |
| R tail obs | 42 | 42 | 42 | 42 | 42 | 42 |
| (donor alleles) | | | | | | |
| R tail exp. | 21 | 21 | 21 | 21 | 21 | 21 |
| (if | | | | | | |
| independent) | | | | | | |
| S tail lines | 15 | 15 | 15 | 15 | 15 | 15 |
| S tail obs | 0 | 0 | 0 | 0 | 0 | 0 |
| (RP alleles) | | | | | | |
| S tail | 15 | 15 | 15 | 15 | 15 | 15 |
| expected | | | | | | |
| (R obs − R | 21.0 | 21.0 | 21.0 | 21.0 | 21.0 | 21.0 |
| exp)\hat{ }2/R exp | | | | | | |
| (S obs − S | 15.0 | 15.0 | 15.0 | 15.0 | 15.0 | 15.0 |
| exp)\hat{ }2/S exp | | | | | | |
| sum Chi-Sq | 36.0 | 36.0 | 36.0 | 36.0 | 36.0 | 36.0 |

| | simplex marker | | | | |
|---|---|---|---|---|---|
| | S_54973_806 | S_54975_531 | S_54977_728 | S_54978_371 | PZE-106074105 |
| | position AGP v4 | | | | |
| | 133507966 | 133535334 | 133579300 | 133595880 | 133604226 |
| Resistant | 21 | 21 | 21 | 21 | 21 |
| tail lines | | | | | |
| R tail obs | 42 | 42 | 42 | 42 | 42 |
| (donor alleles) | | | | | |
| R tail exp. | 21 | 21 | 21 | 21 | 21 |
| (if | | | | | |
| independent) | | | | | |
| S tail lines | 14 | 15 | 15 | 15 | 15 |
| S tail obs | 6 | 2 | 2 | 2 | 8 |
| (RP alleles) | | | | | |
| S tail | 14 | 15 | 15 | 15 | 15 |
| expected | | | | | |
| (R obs − R | 21.0 | 21.0 | 21.0 | 21.0 | 21.0 |
| exp)\hat{ }2/R exp | | | | | |
| (S obs − S | 4.6 | 11.3 | 11.3 | 11.3 | 3.3 |
| exp)\hat{ }2/S exp | | | | | |
| sum Chi-Sq | 25.6 | 32.3 | 32.3 | 32.3 | 24.3 |

[0996] The results from the above analysis indicate that the causal gene(s) for resistance lie between the AGP v4.0 physical map positions chr6: 129032506 and chr6: 129436586, a distance of 404,080 base pairs.

[0997] To further narrow down the mapping interval new homozygote recombinant plants (76 from 15 families) were phenotyped again in one location with two replications and three replications per recombinant plant. With four recombinant plants on the left site and three recombinant plants on the right site the new interval could be determined from marker PZE-106073330 (B73AGPv04 132828359 bp) to Affx-90423958 (B73AGPv04 133070737) (see further below Table 11).

### Example 2. Development of Stalk Splitter Apparatus

[0998] A stalk splitter apparatus was developed with the goal of more safely and efficiently splitting stalks in the field. The stalk splitter has a solid aluminum body with a hole in the middle through which the cut off stalk is passed. See, e.g., FIGS. 5 and 6. A blade is centered above the hole to split open the stalk. The blade is easily removable for sharpening. During operation, the stalk splitter is initially positioned above the corn stalk such that the top of the corn stalk fits into the hole.

[0999] Below the blade are two rollers which push in on the stalk to center it such that the cut of the variable diameter stalks is consistently in the middle. These rollers are tensioned by springs residing in channels drilled horizontally out from the center hole in the body of the splitter on either side of the rollers.

[1000] The stalk splitter cuts the corn stalk through application of downward force onto the corn stalk.

[1001] The stalk splitter device has 50 cm handles extending up from the outer top to enable the user to push down on the cut off stalk all the way to the ground while standing. The handles are shown in FIG. 3.

[1002] Throughout the examples described herein, phenotyping of corn stalks was performed by inoculating the stalks with the causal organism (e.g., Colletotrichum graminicola or Fusarium verticilliodes spores). At physiologic maturity, inoculated plants were cut off at about 0.7 m high with limb trimmers. The degree of internal rot was assessed by splitting open the stalk for visual rating.

### Example 3. Evaluation of Resistance Locus on Chromosome 4

[1003] PCR amplification was performed to amplify sequences on chromosome 4, particularly those described in U.S. Pat. No. 8,062,847, which is incorporated by reference herein in its entirety. For the genic interval covered by SEQ ID NO: 50, five overlapping amplicons were in common from the 5′ end (Appendix 1). However, Mp305 produced amplicons at the end of the interval, whereas NC262A and NC342 did not.

[1004] Several single nucleotide polymorphisms (SNPs) between Mp305 and DW1035 versus NC262a and NC342 could be identified from a comparison of amplicon sequences shown in FIG. 2. In particular, Table 5 shows ten exemplary polymorphisms between Mp305 and DW1035 vs. NC262a and NC342 within amplicons shown in FIG. 2. In two cases, SNPs result in alteration of the amino acid sequence as indicated in Table 5 in the column titled “Effect”.

TABLE 5

| | | Exon/ | | |
|---|---|---|---|---|
| SNP | Amplicon | Intron | Polymorphism | Effect |
| 1 | 2 | Intron | A → C | silent |
| 2 | 2 | Intron | G → C | silent |
| 3 | 2 | Intron | C → T | silent |
| 4 | 2 | Intron | C → A | silent |
| 5 | 2 | Intron | A → T | silent |
| 6 | 3 | Exon2 | A → G | Lysine (L) → Arginine (R) |
| 7 | 4 | Exon2 | A → G | silent |
| 8 | 4/5 | Exon2 | G → A | silent |
| 9 | 6 | Exon2 | C → A | Serine (S) → Arginine (R) |
| 10 | 6 | Exon2 | A → C | silent |

[1005] In Table 7 of U.S. Pat. No. 8,062,847, Mp305 was shown to have a C at position 1308 of SEQ ID NO: 50 as well as its resistant progeny. Other genotypes lack a fragment containing this base and are polymorphic at other positions. A novel insert is included in Mp305, its progeny DW1035, as well as in NC262A and NC342. Other genotypes tested in that patent as well as those genotyped and shown in Table 6 lack these amplicons.

[1006] It is important to note that Mp305 and DW1035 have amplicons beyond the region specified in that patent whereas NC262A and NC342 do not. NC262A and NC342 have a certain level of identity over all five amplicons. These lines possess two distinct alleles on chromosome 4 as further demonstrated in Tables 3 and 4. There are at least 10 SNPs between them in addition to having a shorter insert.

[1007] Selected SNPs were identified in allelic variants NC262A and NC342 on chromosome 4. Consensus position is determined with reference to SEQ ID NO: 50 (identical to SEQ ID NO: 1 of U.S. Pat. No. 8,062,847). Using the published sequences, the bases delineated Table 7 of U.S. Pat. No. 8,062,847 were analyzed. The data is shown in Table 6 below, with “NA” denoting “Not Amplified”. Primer sequences for detecting the SNPs in chromosome 4 are shown in Table 7.

TABLE 6

| | C0060- | Consensus position | | | | | | | | | | |
|---|---|---|---|---|---|---|---|---|---|---|---|---|
| Sample | 02 | 413 | 958 | 971 | 1099 | 1154 | 1250 | 1308 | 1607 | 2001 | 2598 | 3342 |
| Mp305 | Rcg1 | A:A | A:A | G:G | C:C | C:C | A:A | C:C | A:A | A:A | G:G | C:C |
| DW1035 | Rcg1 | A:A | A:A | G:G | C:C | C:C | A:A | C:C | A:A | A:A | G:G | C:C |
| NC262A | Rcg1 | C:C | C:C | C:C | T:T | A:A | T:T | C:C | G:G | G:G | A:A | A:A |
| NC342 | Rcg1 | C:C | C:C | C:C | T:T | A:A | T:T | C:C | G:G | G:G | A:A | A:A |
| GEMN- | NA | NA | NA | NA | NA | NA | NA | NA | NA | NA | NA | NA |
| 0117 | | | | | | | | | | | | |
| GEMS- | NA | NA | NA | NA | NA | NA | NA | NA | NA | NA | NA | NA |
| 0016 | | | | | | | | | | | | |
| blank | NA | NA | NA | NA | NA | NA | NA | NA | NA | NA | NA | NA |
| SNP | | | 1 | 2 | 3 | 4 | 5 | | 6 | 7 | 8 | 9 |
| acc. to | | | | | | | | | | | | |
| Table 3 | | | | | | | | | | | | |

TABLE 7
Markers to detect SNPs of Table 6: Chromosome 4 primers

| SNP_id | Primer_AlleleX | Primer_AlleleY | Primer_Common |
|---|---|---|---|
| Rcg1_SE | GAAGGTGACCAAGTT | GAAGGTCGGAGTCAACG | GCGACCGTACAGTCCGA |
| Q1413 | CATGCTATCGCTTCTT | GATTCGCTTCTTGTACCA | CGAAA |
| | GTACCATGTGACCA | TGTGACCC | (SEQ ID NO: 60) |
| | (SEQ ID NO: 58) | (SEQ ID NO: 59) | |
| Rcg1_SE | GAAGGTGACCAAGTT | GAAGGTCGGAGTCAACG | GAATAAAATAACGGTGA |
| Q11099 | CATGCTTTGGAAAAG | GATTCTTTGGAAAAGCG | GAAATGTATGCAA |
| | CGGTAGTGTTTTGAC | GTAGTGTTTTGAT | (SEQ ID NO: 63) |
| | (SEQ ID NO: 61) | (SEQ ID NO: 62) | |
| Rcg1_SE | GAAGGTGACCAAGTT | GAAGGTCGGAGTCAACG | CTTCCATGCCCAAAACA |
| Ql_1250 | CATGCTCAATCAGTG | GATTCAATCAGTGTGTC | TGTCCGAT |
| | TGTCTGATCTCAAAG | TGATCTCAAAGAA | (SEQ ID NO: 66) |
| | AT | (SEQ ID NO: 65) | |
| | (SEQ ID NO: 64) | | |
| Rcg1_SE | GAAGGTGACCAAGTT | GAAGGTCGGAGTCAACG | GCTCTGAGTGTTCGTCA |
| Q11607 | CATGCTCTTCTAACGG | GATTCTCTTCTAACGGTT | CTAAGTCTT |
| | TTATGTGCACAA | ATGTGCACAG | (SEQ ID NO: 69) |
| | (SEQ ID NO: 67) | (SEQ ID NO: 68) | |
| Rcg1_SE | GAAGGTGACCAAGTT | GAAGGTCGGAGTCAACG | GCGATGGTTAGCAGAGG |
| Ql_2001 | CATGCTTGAAGTTTTC | GATTGAAGTTTTCACTA | GATTTGTA |
| | ACTAGATGAAGGCTG | GATGAAGGCTGC | (SEQ ID NO: 72) |
| | T | (SEQ ID NO: 71) | |
| | (SEQ ID NO: 70) | | |
| Rcg1_SE | GAAGGTGACCAAGTT | GAAGGTCGGAGTCAACG | GTCTCTAAGTTACTCTGT |
| Q12598 | CATGCTATAAAATCA | GATTGATAAAATCAAGA | CCAGTTAAGAA |
| | AGATAACAAGTGACA | TAACAAGTGACATGCAA | (SEQ ID NO: 75) |
| | TGCAG | (SEQ ID NO: 74) | |
| | (SEQ ID NO: 73) | | |
| Rcg1_SE | GAAGGTGACCAAGTT | GAAGGTCGGAGTCAACG | AGCAACAGAACAGTCTA |
| Ql_3342 | CATGCTGTTGGTCAA | GATTGTTGGTCAACTCA | CAGCCTTAATTT |
| | CTCATCTGATGAAAG | TCTGATGAAAGA | (SEQ ID NO: 78) |
| | C | (SEQ ID NO: 77) | |
| | (SEQ ID NO: 76) | | |

[1008] The data in Table 6 shows that the resistance alleles from NC262A and NC342 are the same. These resistance alleles are allelic to that from Mp305, but not identical in state owing to its truncated length and many SNPs. The alleles are alike only at position 1308 using these markers.

[1009] Selection of inbreds with ASR resistance was effective via marker assisted backcrossing (MABC) for the NC262A or NC342 allele using KASP markers outside this genic region.

### Example 4. Evaluation of Genes in Resistance Locus on Chromosome 6

[1010] As described above, the region on chromosome 6 has been fine mapped. Table 8 shows candidate genes for the resistance phenotype have been identified in the fine mapped region linked closely with the trait on chromosome 6.

TABLE 8
Candidate Genes in the ASR Locus on Chromosome 6

| Gene | | | | |
|---|---|---|---|---|
| in | | | | Gene |
| region | Identifier | v4 interval | Gene name | symbol |
| A | Zm00001d037636 | Chr6: 132563692 | Cellulose synthase 2 | cesa2 |
| | | . . . 132569944 | | |
| B | Zm00001d037645 | Chr6: 132762227 | Calcium dependent protein | CDPK3 |
| | | . . . 132764738 | kinase 3 | |
| C | Zm00001d037648 | Chr6: 132796567 | NB-ARC LRR13 disease | Rpp13 |
| | | . . . 132805878 | resistance protein | |
| D | Zm00001d037666 | Chr6: 133532459 | Homology to serine/threonine | GSO1 |
| | | . . . 133535392 | protein kinase | |
| E | Zm00001d037682 | Chr6: 133908212 | Leucine-rich repeat extensin- | LRX4 |
| | | . . . 133909537 | like protein 4 | |
| F | Zm00001d037635 | Chr6: 132525481 | wall-associated receptor protein | |
| | | . . . 132529995 | kinase family protein | |
| G | Zm00001d037637 | Chr6: 132582694 | wall-associated receptor protein | |
| | | . . . 132586993) | kinase family protein | |
| H | Zm00001d037640 | Chr6: 132629007 | Adenine nucleotide transporter | |
| | | . . . 132634967 | BT1 chloroplastic/mitochondrial | |
| I | Zm00001d037642 | Chr6: 132669023 | | |
| | | . . . 132672000 | | |
| J | Zm00001d037643 | Chr6: 132723336 | phospholipase D4 | |
| | | . . . 132728573 | | |
| K | Zm00001d037647 | Chr6: 132784055 | hydroxyproline-rich | |
| | | . . . 132787415 | glycoprotein family protein | |
| L | Zm00001d037650 | Chr6: 132828573 | | |
| | | . . . 132836981 | | |
| M | Zm00001d037651 | Chr6: 133037545 | Subtilisin-like serine | |
| | | . . . 133043210 | endopeptidase family protein | |
| N | Zm00001d037652 | Chr6: 133048475 | Inositol-3-phosphate synthase | |
| | | . . . 133050067 | isozyme 1 | |
| O | Zm00001d037653 | Chr6: 133069804 | Xylanase inhibitor protein 1 | |
| | | . . . 133070751 | | |
| P | Zm00001d037656 | Chr6: 133140745 | Xylanase inhibitor protein 1 | |
| | | . . . 133141716 | | |
| Q | Zm00001d037658 | Chr6: 133192852 | | |
| | | . . . 133194981 | | |
| R | Zm00001d037659 | Chr6: 133275793 | Phosphoenolpyruvate/phosphate | |
| | | . . . 133278869 | translocator 2 chloroplastic | |
| S | Zm00001d037661 | Chr6: 133296885 | Serine/threonine-protein kinase | |
| | | . . . 133300907 | | |
| T | Zm00001d037663 | Chr6: 133420435 | NADH-ubiquinone | |
| | | . . . 133424501 | oxidoreductase 10.5 kDa subunit | |
| U | Zm00001d037668 | Chr6: 133555104- | NEP-interacting protein 1 | |
| | | 133557311 | | |
| V | Zm00001d037672 | Chr6: 133574540 | leucine-rich repeat receptor | |
| | | . . . 133578520 | protein kinase family protein | |
| W | Zm00001d037674 | Chr6: 133714246 | Alliin lyase | |
| | | . . . 133717685 | | |
| X | Zm00001d037675 | Chr6: 133723502 | Actin-like ATPase superfamily | |
| | | . . . 133727955 | protein | |
| Y | AGP9L | Chr6: 132,890,926 | Arabinogalactan protein 9-like | |
| | | . . . 132,891,357 | | |

[1011] The involvement of the genes can be verified by several means. A mapping population having been derived through selfing generated a number of pairs of near isogenic lines having the donor or susceptible parent fragment differing between S5 sisters. An orthogonal comparison of the contrasting phenotypes of approximately 16 such pairs will further confirm which fragment contains the causative gene. Further, expression analysis by quantitative PCR for the gene would reveal differential expression.

[1012] A cDNA library generated from RNA extracted from the infected nodal regions would be used. One such gene is calcium dependent protein kinase (CDPK).

[1013] Constitutive or induced resistance is also shown by knocking out the putative resistance gene by mutagenesis, i.e. TILLING (Targeted Induced Local Lesions in Genomes) (Gilchrist, E., et al., TILLING is an effective reverse genetics technique for C. elegans. BMC Genomics, 2006, 7(1), 262.) In such cases, a stop codon, frame shift, or non-synonymous mutation renders the gene product ineffective.

[1014] On chromosome 6, patent publication WO/2015088970, incorporated by reference herein in its entirety, describes the selection for ASR resistance associated with the haplotypes described herein. The bases delineated in Table 6 above were analyzed. The resistance sources uncovered on chromosome 6 that are shown in Table 9 are polymorphic at the base designated in bold. An additional SNP was identified in allelic variant NC262A that was not described in WO2015/088970, and is shown in Table 9 below. The locus on chromosome 6 shown in Table 9 (C16759-001-K1) is a distinct allele not described in WO2015/088970.

TABLE 9
Locus SNP markers on Chromosome
6 Compared to WO 2015/088970

| Locus SNP | NC262A | WO 2015088970 |
|---|---|---|
| C12305-001-K1 | C:C | C:C |
| C12307-001-K1 | C:C | C:C |
| C16759-001-K1 | G:G | A:A |
| C16760-001-K1 | G:G | G:G |
| C12314-001-K1 | A:A | A:A |

[1015] Primer sequences for detecting the SNPs are shown in Table 10.

TABLE 10
Primer Sequences for Detecting the SNPs in Table 9

| Code | Primer_AlleleX | Primer_AlleleY | Primer_Common |
|---|---|---|---|
| C12305-001-K1 | GAAGGTGACCAAGTT | GAAGGTCGGAGTCAA | ACACACCTTCAATAC |
| | CATGCTAACAGAATC | CGGATTGAACAGAAT | CCTCCTCGAT |
| | TTCAGCTCCCATCTTC | CTTCAGCTCCCATCTT | (SEQ ID NO: 81) |
| | (SEQ ID NO: 79) | T | |
| | | (SEQ ID NO: 80) | |
| C12307-001-K1 | GAAGGTGACCAAGTT | GAAGGTCGGAGTCAA | CAATCTTCAATGCCA |
| | CATGCTTCTTTTYGCC | CGGATTCTTCTTTTYG | ACACCACTCCAT |
| | TCCATTTTCGCC | CCTCCATTTTCGCA | (SEQ ID NO: 84) |
| | (SEQ ID NO: 82) | (SEQ ID NO: 83) | |
| C16759-001-K1 | GAAGGTGACCAAGTT | GAAGGTCGGAGTCAA | CGTTGAGATGCTTTCA |
| | CATGCTAGAGTTCCCC | CGGATTGAGTTCCCC | TAATGATCAAGGTA |
| | ATAATTATGCTGATGA | ATAATTATGCTGATGG | (SEQ ID NO: 87) |
| | (SEQ ID NO: 85) | (SEQ ID NO: 86) | |
| C16760-001-K1 | GAAGGTGACCAAGTT | GAAGGTCGGAGTCAA | TTGCCAGAGAAGTAT |
| | CATGCTAGACTGATT | CGGATTAGACTGATT | GGTCTTACTCTTA |
| | GATCATTTTAGGGGG | GATCATTTTAGGGGG | (SEQ ID NO: 91) |
| | A | G | |
| | (SEQ ID NO: 88) | (SEQ ID NO: 89) | |
| C12314-001-K1 | GAAGGTGACCAAGTT | GAAGGTCGGAGTCAA | AAAAAGTCAGTACAG |
| | CATGCTCATCCAATG | CGGATTATCCAATGG | ACTTGTGGRACAT |
| | GCATTAAGTGACCTC | CATTAAGTGACCTCG | (SEQ ID NO: 93) |
| | A | (SEQ ID NO: 92) | |
| | (SEQ ID NO: 91) | | |

[1016] The involvement of the candidate genes in anthracnose stalk rot resistance can be verified by several means. A mapping population having been derived through selfing, generated a number of pairs of near isogenic lines having the donor or susceptible parent fragment differing between S5 sisters. An orthogonal comparison of the contrasting phenotypes of approximately 16 such pairs will further confirm which fragment contains the causative gene. Further, expression analysis by quantitative PCR for the gene would reveal differential expression. Constitutive or induced resistance can also be shown by knocking out the putative resistance gene by mutagenesis, i.e. TTLLING (Targeted Induced Local Lesions in Genomes) (Gilchrist, E., et al., TILLING is an effective reverse genetics technique for C. elegans. BMC Genomics, 2006, 7(1), 262.) In such cases, a stop codon, frame shift, or non-synonymous mutation renders the gene product ineffective.

[1017] Further mapping of the QTL on chromosome 6 was performed by the identification of additional recombinants as shown in Table 11. Based on these recombinants, the list of candidate genes for anthracnose stalk rot resistance has been narrowed to two genes: Zm00001d037650 and Zm00001d037651, identified according to the annotation of B73AGPv4.

TABLE 11
Anthracnose stalk rot Resistance Candidate Genes on Chromosome 6

| | | position | | |
|---|---|---|---|---|
| | | B73AGPv04 | B73AGPv05 | NC262A |
| Recombinant- | Marker left - | 132828359 | 139646631 | MA_NC262A_v2.contig81: 29672136 |
| interval new | PZE- | | | |
| | 106073330 | | | |
| Recombinant- | Marker right - | 133070737 | 139889078 | MA_NC262A_v2.contig81: 29819546 |
| interval new | Affx-90423958 | | | |

[1018] The positions of the two candidate genes on chromosome 6 are shown in Table 12 according to different versions of the maize reference genome. For example, Table 12 shows the annotation of these in the older genome reference B73AGPv02 (identifiers: GRMZM2G002656 and GRMZM2G145589) and most recent reference B73AGPv5 (identifiers: Zm00001e0311 094 and Zm00001e031197.

TABLE 12
Annotation of Anthracnose Resistance Candidate Genes

| | B73AGPv02 | B73AGPv04 | B73AGPv05 | NC262A |
|---|---|---|---|---|
| Position | 6: 128823409 . . . | 6: 132828573 . . . | 6: 139644733 . . . | MA_NC262A_v2.contig81: |
| | 128833681 | 132832542 | 139655572 | 29668461 . . . 29683871 |
| Gene | GRMZM2G002656 | Zm00001d037650 | Zm00001e031194 | ZmNC262Av2c_OGOO1508HC.1 |
| ID | | | | |
| Position | 6: 129031310 . . . | 6: 133037545 . . . | 6: 139855686 . . . | MA_NC262A_v2.contig81: |
| | 129036927 | 133043210 | 139861571 | 29804742-29814143 |
| Gene | GRMZM2G145589 | Zm00001d037651 | Zm00001e031197 | ZmNC262Av2c_OGOO1512HC.1 |
| ID | | | | |

[1019] It was noted that the sequence annotation of these loci varies between the B73AGPv04 and B73AGPv05 sequences. The genomic sequence for candidate gene Zm00001e031194 in the NC262A genotype (ZmNC262Av2c_OGOO1508HC.1) is provided in SEQ ID NO: 266. The putative cDNA for candidate gene Zm00001e031194 in the NC262A genotype is provided in SEQ ID NO: 267 (ZmNC262Av2c_OGOO1508HC.1). The protein encoded by SEQ ID NO: 267 is provided in SEQ ID NO: 268. The genomic sequence for candidate gene for candidate gene Zm00001e031197 in the NC262A genotype (ZmNC262Av2c_OGOO1512HC.1) is provided in SEQ ID NO:269. The cDNA for candidate gene Zm00001e031197 in the NC262A genotype is provided in SEQ ID NO: 270 (ZmNC262Av2c_OGOO1512HC.1). The protein encoded by SEQ ID NO: 270 is provided in SEQ ID NO: 271.

[1020] Both candidate genes Zm00001e031194 and Zm00001e031197 are located on a contig derived from NC262A called MA_NC262A_v2.contig81. The complete genomic sequence between the new marker positions PZE-106073330-Affx-90423958 is shown in SEQ ID NO: 272. This contig derived from source NC262A can be used as target for markers for screening on resistance locus. Table 13 lists polymorphisms which are usable to identify anthracnose stalk rot resistance locus and follow the anthracnose stalk rot resistance locus during breeding selection numbered according to the B73AGPv04 genome sequence.

TABLE 13
Useful Polymorphisms

| | | | Variant | |
|---|---|---|---|---|
| | | | Nucleotide(s) | marker |
| Position | Chromo- | Reference | in | SEQ ID |
| B73_V4 | some | Sequence | NC262A | NO: |
| 132836954 | 6 | G | A | 273 |
| 132836944 | 6 | C | T | 274 |
| 132836869 | 6 | G | A | 275 |
| 132836849 | 6 | G | T | 276 |
| 132836845 | 6 | C | T | 277 |
| 132836840 | 6 | C | G | 278 |
| 132836830 | 6 | G | T | 279 |
| 132836810 | 6 | G | A | 280 |
| 132836805 | 6 | AG | CA | 281; 282 |
| 132836802 | 6 | ATC | --- | 283; 284 |
| 132836799 | 6 | ATT | --- | 283; 284 |
| 132836791 | 6 | G | A | 285 |
| 132836787 | 6 | ATA | CTG | 286; 287 |
| 132836781 | 6 | AT | GA | 288; 289 |
| 132836776 | 6 | G | T | 290 |
| 132836767 | 6 | GA | AG | 291; 292 |
| 132836762 | 6 | G | A | 293 |
| 132836679 | 6 | “------G” | CGCCAAA | 294; 295 |
| 132836678 | 6 | T | A | 296 |
| 132836670 | 6 | T | G | 297 |
| 132836667 | 6 | G | T | 298 |
| 132836665 | 6 | T | A | 299 |
| 132836662 | 6 | T | C | 300 |
| 132836660 | 6 | G | T | 301 |
| 132836651 | 6 | A | G | 302 |
| 132836643 | 6 | AAT | --- | 303; 304 |
| 132836636 | 6 | GCCATG | ------ | 305; 306 |
| 132836622 | 6 | CA | AG | 307; 308 |
| 132836620 | 6 | GA | AC | 309; 310 |
| 132836612 | 6 | C | G | 311 |
| 132836603 | 6 | A | G | 312 |
| 132836591 | 6 | G | C | 313 |
| 132836586 | 6 | G | A | 314 |
| 132836580 | 6 | T | G | 315 |
| 132836069 | 6 | G | A | 316 |
| 132836063 | 6 | G | A | 317 |
| 132836061 | 6 | A | G | 318 |
| 132836056 | 6 | T | G | 319 |
| 132836050 | 6 | T | C | 320 |
| 132836047 | 6 | ACC | CGT | 321; 322 |
| 132836034 | 6 | T | G | 323 |
| 132836031 | 6 | T | G | 324 |
| 132836019 | 6 | A | T | 325 |
| 132836008 | 6 | C | G | 326 |
| 132835978 | 6 | C | G | 327 |
| 132835910 | 6 | A | G | 328 |
| 132835851 | 6 | A | G | 329 |
| 132835819 | 6 | T | C | 330 |
| 132835803 | 6 | A | G | 331 |
| 132835793 | 6 | A | T | 332 |
| 132835788 | 6 | A | C | 333 |
| 132835781 | 6 | T | A | 334 |
| 132835779 | 6 | G | A | 335 |
| 132835776 | 6 | A | T | 336 |
| 132835746 | 6 | A | G | 337 |
| 132835729 | 6 | C | A | 338 |
| 132835728 | 6 | G | C | 339 |
| 132835722 | 6 | ------ | GACATC | 340; 341 |
| 132835713 | 6 | A | T | 342 |
| 132835708 | 6 | GAA | --- | 343; 344 |
| 132835705 | 6 | ATA | --- | 343; 344 |
| 132835702 | 6 | GAT | --- | 343; 344 |
| 132835693 | 6 | A | G | 345 |
| 132835681 | 6 | C | T | 346 |
| 132835671 | 6 | A | C | 347 |
| 132835666 | 6 | A | T | 348 |
| 132835271 | 6 | G | A | 349 |
| 132835267 | 6 | AC | GG | 350; 351 |
| 132835147 | 6 | G | T | 352 |
| 132835031 | 6 | T | C | 353 |
| 132834960 | 6 | G | A | 354 |
| 132834951 | 6 | G | A | 355 |
| 132834946 | 6 | GA | AC | 356; 357 |
| 132834942 | 6 | G | A | 358 |
| 132834929 | 6 | T | A | 359 |
| 132834927 | 6 | A | T | 360 |
| 132834924 | 6 | T | A | 361 |
| 132834919 | 6 | G | C | 362 |
| 132834908 | 6 | G | T | 363 |
| 132834899 | 6 | C | A | 364 |
| 132834754 | 6 | G | C | 365 |
| 132834753 | 6 | A | C | 366 |
| 132834748 | 6 | G | C | 367 |
| 132834721 | 6 | G | A | 368 |
| 132834632 | 6 | C | A | 369 |
| 132834622 | 6 | T | C | 370 |
| 132834615 | 6 | C | G | 371 |
| 132834602 | 6 | T | C | — |
| 132834589 | 6 | A | G | 372 |
| 132834581 | 6 | C | T | 373 |
| 132834577 | 6 | T | A | 374 |
| 132834569 | 6 | T | G | 375 |
| 132834539 | 6 | A | C | 376 |
| 132834532 | 6 | AGT | GAG | 377; 378 |
| 132834494 | 6 | C | T | 379 |
| 132834431 | 6 | C | T | 380 |
| 132834389 | 6 | A | G | 381 |
| 132834208 | 6 | C | T | 382 |
| 132831963 | 6 | A | T | 383 |
| 132831924 | 6 | T | G | 384 |
| 132831915 | 6 | G | A | 385 |
| 132831839 | 6 | C | G | 386 |
| 132829096 | 6 | C | T | 387 |
| 132828997 | 6 | T | A | 388 |
| 132828958 | 6 | A | G | 389 |
| 132828950 | 6 | C | G | 390 |
| 132828867 | 6 | T | C | 391 |
| 132827606 | 6 | G | A | 392 |
| 132827596 | 6 | ----- | AGTTC | 393; 394 |
| | | ----- | ATAAT | |
| | | ----- | AAAGT | |
| | | ----- | GATAG | |
| | | ---- | AGTT | |
| | | | (SEQ ID | |
| | | | NO: | |
| | | | 414) | |
| 132827573 | 6 | C | T | 395 |
| 132827566 | 6 | A | G | 396 |
| 132827549 | 6 | C | A | 397 |
| 132827545 | 6 | ACG | TAT | 398; 399 |
| 132827302 | 6 | A | C | 400 |
| 132826983 | 6 | C | T | 401 |
| 132826940 | 6 | C | T | 402 |
| 133040380 | 6 | C | T | 403 |
| 133040382 | 6 | A | C | 404 |
| 133040760 | 6 | C | T | 405 |

[1021] The present disclosure is not to be limited in scope by the specific embodiments described herein. Indeed, various modifications of the disclosure in addition to those described herein will become apparent to those skilled in the art from the foregoing description and the accompanying figures. Such modifications are intended to fall within the scope of the appended claims. It is further to be understood that all values are approximate, and are provided for description.

[1022] Patents, patent applications, publications, product descriptions, and protocols are cited throughout this application, the disclosures of which are incorporated herein by reference in their entireties for all purposes.

### INCORPORATION BY REFERENCE

[1023] All references, articles, publications, patents, patent publications, and patent applications cited herein are incorporated by reference in their entireties for all purposes. However, mention of any reference, article, publication, patent, patent publication, and patent application cited herein is not, and should not be taken as an acknowledgment or any form of suggestion that they constitute valid prior art or form part of the common general knowledge in any country in the world.

### NUMBERED EMBODIMENTS OF THE DISCLOSURE

[1024] Notwithstanding the appended claims, the disclosure sets forth the following numbered embodiments:

1. A process of identifying a maize plant that displays enhanced resistance to anthracnose stalk rot, the process comprising detecting in the maize plant
[1025] a. the presence of at least two markers at a resistance locus on chromosome 6 comprising a “G” at C16759-001-K1 and one of the following single nucleotide polymorphisms:
   [1026] a “C” at C12305-001-K1,
   [1027] a “C” at C12307-001-K1,
   [1028] a “G” at C16760-001-K1,
   [1029] an “A” at C12314-001-K1; and/or
[1030] b. the presence of at least one marker at a resistance locus on chromosome 6 comprising
[1031] at least one of the variant nucleotide polymorphisms recited in Table 13, wherein the at least two markers of (a) and/or the at least one marker of (b) are closely linked to and associated with the resistance locus on chromosome 6.
   2. The process of embodiment 1, wherein the resistance locus on chromosome 6 is located on a chromosomal interval between makers PZE-106066805 and PZE-106075546.
   3. The process of embodiment 1, wherein the resistance locus on chromosome 6 is located on a chromosomal interval between 139646631 and 139889078 numbered according to the B73AGPv05 genome sequence.
   4. The process of embodiment 1, wherein the resistance locus of chromosome 6 comprises SEQ ID NO: 272, or a fragment thereof.
   5. The process of embodiment 1, wherein the resistance locus on chromosome 6 comprises one or more nucleotide sequences selected from the group consisting of
[1032] i. a nucleotide sequence of SEQ ID NO: 266 or 269,
[1033] ii. a nucleotide sequence having a coding sequence of SEQ ID NO: 267 or 270,
[1034] iii. a nucleotide sequence which is complementary to a sequence from i. or ii.,
[1035] iv. a nucleotide sequence which has at least 80% identity with a sequence from i., ii. or iii.,
[1036] v. a nucleotide sequence which differs from a nucleic acid sequence according to i., ii. or iii. depending on the degeneracy of the genetic code,
[1037] vi. a nucleotide sequence which hybridizes with a nucleic acid sequence according to i., ii. or iii. under stringent conditions,
[1038] vii. a nucleotide sequence which encodes for a protein comprising the sequence of SEQ ID NO: 268 or 271, or
[1039] viii. a nucleotide sequence which encodes for a protein comprising a sequence with at least 80% identity to the sequence of SEQ ID NOs: 268 or 271.
   6. The process of embodiment 1, wherein the resistance locus on chromosome 6 is derived from NC262A.
   7. The process of embodiment 1, the process comprising detecting in the maize plant the presence or absence of at least one allele at the resistance locus on chromosome 6 from embodiment 1 (b).
   8. The process of any one of embodiments 1-7, wherein the at least one marker at the resistance locus on chromosome 6 detects a “G” at C16759-001-K1.
   9. The method of any one of embodiments 1 to 8, wherein the presence or absence of at least one nucleotide polymorphism is detected by polymerase chain reaction amplification of a nucleic acid present in the maize plant with a primer configured to specifically amplify a nucleic acid sequence comprising one or more of the nucleotide polymorphisms.
   10. The method of embodiment 9, wherein the nucleotide polymorphisms are selected from the group consisting of the variant nucleotides recited in Table 13.
   11. The method of any one of embodiments 1 to 10, wherein the presence or absence of the allele comprising a “G” at C16759-001-K1 is detected by polymerase chain reaction amplification of a nucleic acid present in the maize plant with a primer configured to specifically amplify a nucleic acid sequence of the allele.
   12. The method of embodiment 11, wherein the primer comprises the sequence AATTATGCTGATGA (SEQ ID NO: 413).
   13. A process of selecting a maize plant with anthracnose stalk rot resistance, the process comprising identifying the maize plant according to the process of any one of embodiments 1 to 12, and selecting the maize plant as having anthracnose stalk rot resistance if the presence or absence of the at least one marker at the resistance locus on chromosome 6 is detected.
   14. The process of embodiment 13, further comprising selecting the maize plant that comprises at least one additional marker allele that is closely linked to and associated with the nucleotide polymorphism(s).
   15. The process of embodiment 14, wherein the additional marker allele is linked to the single nucleotide polymorphism by no more than 2 cM on a single meiosis based genetic map.
   16. The process of any one of embodiments 13 to 15, further comprising selecting the maize plant that comprises at least one additional marker allele that is linked to and associated with the allele comprising a “G” at C16759-001-K1.
   17. The process of embodiment 16, wherein the additional marker allele is linked to the allele comprising a “G” at C16759-001-K1 by no more than 2 cM on a single meiosis based genetic map.
   18. The process of any one of embodiments 13 to 15, further comprising selecting the maize plant that comprises at least one additional marker allele that is linked to and associated with the allele comprising a variant nucleotide polymorphism recited in Table 13.
   19. The process of any one of embodiments 1 to 17, further comprising backcrossing the identified maize plant with another maize plant, preferably comprising backcrossing the resistance locus on chromosome 6 into a genotype which is not NC262A.
   20. A method of introgressing an allele associated with anthracnose stalk rot resistance into a maize plant, the method comprising:
[1040] a. screening a population with a nucleic acid assay for the detection of at least one marker at a resistance locus on chromosome 6 comprising:
   [1041] (i) the following single nucleotide polymorphisms
      [1042] a “C” at C12305-001-K1,
      [1043] a “C” at C12307-001-K1,
      [1044] a “G” at C16759-001-K1,
      [1045] a “G” at C16760-001-K1,
      [1046] an “A” at C12314-001-K1; and/or
   [1047] (ii) one or more of the variant nucleotide polymorphisms recited in Table 13; and
[1048] b. selecting from the population at least one maize plant comprising the resistance locus on chromosome 6 or comprising a “G” at C16759-001-K1 and/or one or more of the variant nucleotide polymorphisms recited in Table 13; and
[1049] c. crossing the at least one maize plant to a second maize plant;
[1050] d. evaluating progeny plants for the presence of the “G” at C16759-001-K1 and/or one or more of the variant nucleotide polymorphisms recited in Table 13; and
[1051] e. selecting progeny plants possessing the “G” at C16759-001-K1 and/or one or more of the variant nucleotide polymorphisms recited in Table 13.
   21. The method of embodiment 20, wherein the at least one marker is located within 5 cM of the “G” at C16759-001-K1.
   22. The method of embodiment 20, wherein the at least one marker is located within 1 cM of the “G” at C16759-001-K1.
   23. The method of embodiment 20, wherein the resistance locus on chromosome 6 is located on a chromosomal interval between makers PZE-106066805 and PZE-106075546.
   24. The method of embodiment 20, wherein the resistance locus on chromosome 6 is located on a chromosomal interval between 139646631 and 139889078 numbered according to the B73AGPv05 genome sequence.
   25. The method of embodiment 20, wherein the resistance locus of chromosome 6 comprises SEQ ID NO: 272, or a fragment thereof.
   26. The method of embodiment 20, wherein the resistance locus on chromosome 6 comprising one or more nucleotide sequences selected from the group consisting of
[1052] i. a nucleotide sequence of SEQ ID NO:266 or 269,
[1053] ii. a nucleotide sequence having a coding sequence of SEQ ID NO: 267 or 270,
[1054] iii. a nucleotide sequence which is complementary to a sequence from i. or ii.,
[1055] iv. a nucleotide sequence which has at least 80% identity with a sequence from i., ii. or iii.,
[1056] v. a nucleotide sequence which differs from a nucleic acid sequence according to i., ii. or iii. depending on the degeneracy of the genetic code,
[1057] vi. a nucleotide sequence which hybridizes with a nucleic acid sequence according to i., ii. or iii. under stringent conditions,
[1058] vii. a nucleotide sequence which encodes for a protein comprising the sequence of SEQ ID NOs: 268 or 271, or
[1059] viii. a nucleotide sequence which encodes for a protein comprising a sequence with at least 80% sequence identity to the sequence of SEQ ID NO: 268 or 271.
   27. The method of embodiment 20, wherein the resistance locus on chromosome 6 is derived from NC262A.
   28. A method of selecting a maize plant that displays resistance to anthracnose stalk rot, the method comprising:
[1060] a. obtaining a first maize plant that comprises within its genome a haplotype comprising one or more of the following single nucleotide polymorphisms
   [1061] a “C” at C12305-001-K1,
   [1062] a “C” at C12307-001-K1,
   [1063] a “G” at C16759-001-K1,
   [1064] a “G” at C16760-001-K1,
   [1065] an “A” at C12314-001-K1; and/or
[1066] one or more of a variant nucleotide polymorphism recited in Table 13; and
[1067] b. crossing the first maize plant to a second maize plant;
[1068] c. evaluating progeny plants for the haplotype in a. or at least one marker allele linked to and associated with the haplotype in b.; and
[1069] d. selecting progeny plants that possess the haplotype in a.
   29. The method of embodiment 28, wherein the first maize plant is obtained in (a) that comprises within its genome a haplotype comprising one or more of a “G” at C16759-001-K1, or a variant nucleotide polymorphism recited in Table 13.
   30. A nucleic acid molecule comprising one or more nucleotide sequences selected from the group consisting of
[1070] i. a nucleotide sequence of SEQ ID NO: 266, 267, 269, 270 or 272,
[1071] ii. a nucleotide sequence having a coding sequence of SEQ ID NO: 212 or 215,
[1072] iii. a nucleotide sequence which is complementary to a sequence from i. or ii.,
[1073] iv. a nucleotide sequence with at least 80% identity to a sequence from i., ii. or iii.,
[1074] v. a nucleotide sequence which differs from a nucleic acid sequence according to i., ii. or iii. depending on the degeneracy of the genetic code,
[1075] vi. a nucleotide sequence which hybridizes with a nucleic acid sequence according to i., ii. or iii. under stringent conditions,
[1076] vii. a nucleotide sequence which encodes for a protein comprising the sequence of SEQ ID NO: 268 or 271, or
[1077] viii. a nucleotide sequence which encodes for a protein comprising a sequence with at least 80% identity to the sequence of SEQ ID NOs: 268 or 271.
   31. An expression cassette comprising the nucleic acid molecule of embodiment 30 operatively linked to heterologous regulatory element, preferably to a heterologous promoter.
   32. A method for conferring or increasing resistance to anthracnose stalk rot in a maize plant, the method comprising the following steps:
[1078] (a) introducing or introgressing into at least one cell of a maize plant the nucleic acid molecule of embodiment 30;
[1079] (b) optionally regenerating or growing a plant from the at least one cell, and
[1080] (c) causing expression of the nucleic acid molecule in the plant.
   33. A method for manufacturing a maize plant having anthracnose stalk rot resistance, comprising the following steps:
[1081] (a) introducing or introgressing into at least one cell of a maize plant the nucleic acid molecule of embodiment 30, or the expression cassette of embodiment 31; or
[1082] (b.1) introducing of a site-directed nuclease and a repair matrix into at least one cell of a maize plant, wherein the site-directed nuclease is able to generate at least one double-strand break of the DNA in the genome of the at least one cell and the repair matrix comprises the nucleic acid molecule of embodiment 30 or a fragment thereof,
[1083] (b.2) cultivation of the at least one cell of (b.1) under conditions that allow a homology-directed repair or a homologous recombination, wherein the nucleic acid molecule is integrated from the repair matrix into the genome of the maize plant; and
[1084] (c) obtaining the plant having anthracnose stalk rot resistance from the at least one cell.
   34. The method according to embodiment 33, wherein the site-directed nuclease comprises a zinc-finger nuclease, a transcription activator-like effector nuclease, a CRISPR/Cas system, including a CRISPR/Cas9 system, a CRISPR/Cpf1 system, a CRISPR/CasX system, a CRISPR/CasY system, an engineered homing endonuclease, and a meganuclease, and/or any combination, variant, or catalytically active fragment thereof.
   35. A maize plant identified according to the process of any one of embodiments 1-19, or manufactured according to the method of embodiment 33 or embodiment 34.
   36. A maize plant comprising a resistance locus associated with anthracnose stalk rot resistance, wherein the maize plant is prepared by a process comprising introgressing the resistance locus into the maize plant according to the method of any one of embodiments 20-27.
   37. A maize plant comprising a resistance locus associated with anthracnose stalk rot resistance, wherein the maize plant is prepared by a process comprising introgressing the nucleic acid molecule of embodiment 30 into the maize plant.
   38. A maize plant comprising a resistance locus associated with anthracnose stalk rot resistance, wherein the maize plant is prepared by a process comprising introducing the nucleic acid molecule of embodiment 30 into the maize plant.
   39. A seed or plant part of the maize plant of any one of embodiments 35-38.

The application's sequence listing, which the Patent Office published only in electronic form, follows.

SEQUENCE LISTING (417 sequences)

SEQ ID NO: 1 - DNA, 7064 bp, Zea mays
ccgacagatcgacctgctgcagccggtcgcccggcccccactctcagcgtgcgcggcgggggacaggctgtggacagcgacggcccgcgcgacgcgacgtggacgtgcacgctccagccccacagcatccagcggtcaggcaccctccttgcagcgagctaacggccaggatcacccttgctcctccccgccgttacgtgtactagctccaccgccaccggcactagccggtggaaggcgactcccaccaactcaactaaactaaccgagtgagagcgggggagtatgtaatagaggagaaggaaggtgcggagaggaagaggaagcgaagcagcagcagcaccaccactgcgcggcattgcagcgagcaagcgggagggatctggggcatggtggcggtcgctgccgctgccgctcggatctagagggccgcacgggctgattgccctccgccggcctcgtcggtgtcggtggagtgtgaatcggtgtgtgtaggaggagcgcggagatggcggccaacaaggggatggtggcaggctctcacaaccgcaacgagttcgtcatgatccgccacgacggcgacgcgcctgtcccggtacgttcaccaaacccaatgccaccctcgctgctaccttcagattctgttcctgccagtggatctgggattctagaccgaggtgtcagttttagtgtaacgctcggggttcgccggccaattgcggtcgcttctccgtgtctctgctcgtagatttcgcctgcccatttcagcgttgtttccctaagccaccgatcggacgtgtcctcctgccgattcctgaattgttcgtgctcggtccaattcttcgaacagttgccaaatcggcaattggtaatgccagacacgtttctctgtatcggagatccagtgaaatggagcctcggattgattagatccctgtgtttactcatgactgaacaattccttatcataattaccatggcaccgatggtgaattagatccttctttgccctactgcagcttgcctttgtgactaccgcaccattgaattagttcatattatgtaacttctaaattaccttttgtaatattttgatcttaatgtctcgacttgaagactagcagacacttggctgatttttcagtctgtcactcactagtgaagtgcatggatggctgacatgtcttctaattgttgtttgcatgtgtgctgactttgttgttatcttgctgatgcaggctaagcccacgaagagtgcgaatgggcaggtctgccagatttgtggcgacactgttggcgtttcagccactggtgatgtctttgttgcctgcaatgagtgtgccttccctgtctgccgcccttgctatgagtacgagcgcaaggaagggaaccaatgctgccctcagtgcaagactagatacaagagacagaaaggttggtttccttgcatcttctttcggtgtgtgtaacttgtaggatgttagcatgagggagtctacatcacgtgcttactttatgtaaataaaggttgcagtgtaatggacatcccttatgatgttgacatttgacaacctagattcagcctttgaatccgtttcattctcaataacagtagttaacgaattcttctgacttcctctctaatgaaattcaggtagccctcgagttcatggtgatgatgaggaggaagatgttgatgacctggacaatgaattcaactataagcaaggcaatgggaagggcccagagtggcagcttcaaggagatgacgctgatctgtcttcatctgctcgccatgacccacaccatcggattccacgccttacaagtggacaacaggtacaatatatgtcagtcatgttcatttatcgatctgagccttgattctgtggtgtaatgtttgatagtgtgcaccagtgcactttttttactatacttatttctatatgaatatgtgctctcaccaactaacatactgatatttatcttcagatatctggagagatccctgatgcatcccctgaccgtcattctatccgcagtccaacatcgagctatgttgatccaagcgttccaggtattctatcgaacatcgtaaattgctttgtgtggagaatttgctgcatattagctggggataattaatatttttttactatgatttcagttcctgtgaggattgtggacccctcgaaggacttgaattcctatgggcttaatagtgttgactggaaggaaagagttgagagctggagggttaaacaggacaaaaatatgttgcaagtgactaataaatatccagaggctagaggagacatggaggggactggctcaaatggagaagatatgcaaatgtataccaccttcccttgcctatgatatcatacatgcctccttatagtgcattagatttaggtctgcatgatatacatgctgtatctgggaacttgtgttgctttcggatgaactagtcggggtatgttatatgagggtacactgaagaggactcacaagggcattaaactacccattcacagttaatcaatgactaagataattttgcatttcctagtagatgaaggtctatttcctatgcttccttagctaacccttactaatagtgcacacattcatttattgtatattttgcttcaacggaattgagttctctgtaactttttctttatcgcagggttgatgatgcacgcctacctttgagccgcattgtgccaatttcctcaaaccagctcaacctttaccggatagtaatcattctccgtcttatcatcctgtgcttcttcttccaatatcgtatcagtcatccagtgcgtaatgcttatggattgtggctagtatctgttatctgtgaggtctggtttgccttgtcctggcttctagatcagttcccaaaatggtatccaatcaaccgtgagacatatctcgacaggcttgcattgaggtaagctacaatattgcacacatttctttgagattttgtttgctgaaatgtttttttgtgttgatatacctaaatgttgcaggtatgatagagagggagagccatcacagctggctcccattgatgtctttgtcagtacagtggatccattgaaggaacctccactgatcacagccaacactgttttgtccattcttgctgtggattaccctgttgacaaagtgtcatgctatgtttctgatgatggctcagctatgctgacttttgagtctctctctgaaactgccgaatttgctagaaagtgggttcccttttgtaagaagcacaatattgaaccaagagctccagaattttactttgctcaaaaaatagattacctgaaggacaaaattcaaccttcatttgttaaggaaagacgagcaatgaaggtaaactactacctcatggttacatcaccattgctctaccttgttttaactctggatatgctttttttcagagagagtatgaagaattcaaaataagaatcaatgcccttgttgccaaagcacagaaagtgcctgaagaggggtggaccatggctgatggaactgcttggcctgggaataaccctagggaccatcctggcatgattcaggtgcccaaccgcccattgcttcaactgaagcttctttagaaacttggatgtaatcttgttcttatgttttttctatgtgaaatcaggtgttcttggggcacagtggtgggcttgacactgatggaaatgaattaccacgtcttgtctatgtctctcgtgaaaagagaccaggctttcagcatcacaagaaggctggtgcaatgaatgcactggtatgcttttctctccatgaattcacttctacaccaggcacttgattcatctgttccatgctaattatacccctttcactggtgggcagattcgtgtatctgctgtgctgacaaatggtgcctatcttctcaatgtggattgtgaccattacttcaatagcagcaaagctcttagagaagcaatgtgcttcatgatggatccagctctaggaaggaaaacttgttatgtacaatttccacaaagatttgatggcattgacttgcacgatcgatatgctaataggaacatagtcttctttgatgtaagtattgtggaccgatggttcttctgtaatccacaacaagatatttatggctcacatggtatttgttttgcagatcaacatgaaaggtctagatggcattcagggtccagtctatgtgggaacaggatgctgtttcaataggcaggctttgtatggatatgatcctgttttgactgaagctgatctggaacctaacattgttgttaagagctgctgtggtagaaggaagagaaagaacaagagttatatggatagtcaaagccgtattatgaagagaacagaatcttcagctcccatctttaacatggaagacatcgaggagggtattgaaggtgtgttcttgctgttttgcatttcttaccttacttttattcttagagatctgagaacaatcgctgcttttattgcaatatcaaacatgattctcttagtctgatttttggacataaaaaagcaaaacaatctttaccttctcaagttggctggctcctgctgatctcagttttggaatcccattaggttatgaggatgaaaggtcagtgcttatgtcccagaggaaattggagaaacgctttggtcagtctccaatcttcattgcatccacctttatgactcaaggtggcataccaccttcaacaaacccagcttctctactgaaggaagctatccatgttatcagctgtgggtacgaggacaaaactgaatggggaaaagaggttagtgtggcaaacatgttttccctctgattcattaccatagagttctttaacttaatatcgtagcatggtatctcctttttcccgttccaggactcagattgtgattatcctttctatgtttttttttcagattggctggatctatggttcagttacagaggatattctgactgggtttaaaatgcatgcaagaggctggcaatcaatctactgcatgccaccacgaccttgtttcaagggttctgcaccaatcaatctttctgatcgtcttaatcaggtgctccgttgggctcttgggtcagtggaaattctgcttagcagacattgtcctatatggtatggctacaatgggcgattgaagcttttggagaggctggcttacattaacaccattgtttatccaatcacatctgttccgcttatcgcctattgtgtgcttcctgctatctgtcttcttaccaataaatttatcattcctgaggtcagtgacaagatatccacttttccttctgttcagtatttttaggcataactctgttataatttctcatttgtcatatcactgctctaccatgtatacctgctatcacattgaactaacaaatagtaccaatggataagtagtagccataactagtatttgtttcgccttggcatttttcttactctatagagtttattatttgaattatttcgcttgtgatgttaatggacgcaagcaaagtgtcttgtgcaatatgatctagatcagcagagctgtgtttttttcctagattctgccaacctttctattgattatcacattgctatttttctaatgttcataacattttctgatgtgcagattagtaattatgctggaatgttcttcattcttctttttgcctccattttcgcaactggtatattggagctcagatggagtggtgttggcattgaagattggtggagaaatgagcagttttgggttattggtggcacctctgcccatctcttcgcggtgttccagggtctgctgaaagtgttggctgggattgataccaacttcacagttacctcaaaggcatctgatgaggatggcgactttgctgagctatatgtgttcaagtggaccagtttgctcatccctccgaccactgttcttgtcattaacctggtcggaatggtggcaggaatttcgtatgccattaacagcggctaccaatcctggggtccgctctttggaaagctgttcttctcgatctgggtgatcctccatctctaccccttcctcaagggtctcatgggcaggcagaaccgcacgccaacaatcgtcatcgtttggtccatcctccttgcgtctatcttctccttgctgtgggtgaagatcgatcctttcatctccccgacacagaaagctgccgccttggggcaatgtggtgtgaactgctgatccagattgtgactcttatctgaagaggctcagccaaagatctgccccctcgtgtaaatacctgagggggctagatgggaattttttgttgtagatgaggatggatctgcatccaagttatgcctctgtttattagcttcttcggtgccggtgctgctgcagacaatcatggagcctttctaccttgcttgtagtgctggccagcagcgtaaattgtgaattctgcatttttttatacgtggtgtttattgttttagagtaaattatcatttgtttgaggtaactattcacacgaactatatggcaatgctgttatttatacgcaaagactgatacattcttcggattgtgagcaaacagtcagaacactgtaatctcttaggacaactatataaggcagctgttgtatcatctctattgtttctaatggccgagggatatgtagatgtaaatcacttgcaacatcgtattgttggcagtctgtaatgtttgaaaagcatggagggactgatgcggcgtggtctttcatgaattggggaatcagatggcagtccggtagaacttctgctaccgtattttctgatggcattacctttccagctccaccaactgttcgtgtcgtttttgttggatatttaacctagtttaggtatgtctgatttaagaaatctaaattatgtctatacatttgaggatttctagatattagtattgtgtaatggaccaattcttgggtcgtttatttttcggggcggggggccatcgattctaaatgtagaaccaagcaccctggctgtttt

SEQ ID NO: 2 - DNA, 4533 bp, Artificial Sequence
  cDNA of transcript 1 derived from genomic DNA of Cesa2
ccgacagatcgacctgctgcagccggtcgcccggcccccactctcagcgtgcgcggcgggggacaggctgtggacagcgacggcccgcgcgacgcgacgtggacgtgcacgctccagccccacagcatccagcggtcaggcaccctccttgcagcgagctaacggccaggatcacccttgctcctccccgccgttacgtgtactagctccaccgccaccggcactagccggtggaaggcgactcccaccaactcaactaaactaaccgagtgagagcgggggagtatgtaatagaggagaaggaaggtgcggagaggaagaggaagcgaagcagcagcagcaccaccactgcgcggcattgcagcgagcaagcgggagggatctggggcatggtggcggtcgctgccgctgccgctcggatctagagggccgcacgggctgattgccctccgccggcctcgtcggtgtcggtggagtgtgaatcggtgtgtgtaggaggagcgcggagatggcggccaacaaggggatggtggcaggctctcacaaccgcaacgagttcgtcatgatccgccacgacggcgacgcgcctgtcccggctaagcccacgaagagtgcgaatgggcaggtctgccagatttgtggcgacactgttggcgtttcagccactggtgatgtctttgttgcctgcaatgagtgtgccttccctgtctgccgcccttgctatgagtacgagcgcaaggaagggaaccaatgctgccctcagtgcaagactagatacaagagacagaaaggtagccctcgagttcatggtgatgatgaggaggaagatgttgatgacctggacaatgaattcaactataagcaaggcaatgggaagggcccagagtggcagcttcaaggagatgacgctgatctgtcttcatctgctcgccatgacccacaccatcggattccacgccttacaagtggacaacagatatctggagagatccctgatgcatcccctgaccgtcattctatccgcagtccaacatcgagctatgttgatccaagcgttccagttcctgtgaggattgtggacccctcgaaggacttgaattcctatgggcttaatagtgttgactggaaggaaagagttgagagctggagggttaaacaggacaaaaatatgttgcaagtgactaataaatatccagaggctagaggagacatggaggggactggctcaaatggagaagatatgcaaatggttgatgatgcacgcctacctttgagccgcattgtgccaatttcctcaaaccagctcaacctttaccggatagtaatcattctccgtcttatcatcctgtgcttcttcttccaatatcgtatcagtcatccagtgcgtaatgcttatggattgtggctagtatctgttatctgtgaggtctggtttgccttgtcctggcttctagatcagttcccaaaatggtatccaatcaaccgtgagacatatctcgacaggcttgcattgaggtatgatagagagggagagccatcacagctggctcccattgatgtctttgtcagtacagtggatccattgaaggaacctccactgatcacagccaacactgttttgtccattcttgctgtggattaccctgttgacaaagtgtcatgctatgtttctgatgatggctcagctatgctgacttttgagtctctctctgaaactgccgaatttgctagaaagtgggttcccttttgtaagaagcacaatattgaaccaagagctccagaattttactttgctcaaaaaatagattacctgaaggacaaaattcaaccttcatttgttaaggaaagacgagcaatgaagagagagtatgaagaattcaaaataagaatcaatgcccttgttgccaaagcacagaaagtgcctgaagaggggtggaccatggctgatggaactgcttggcctgggaataaccctagggaccatcctggcatgattcaggtgttcttggggcacagtggtgggcttgacactgatggaaatgaattaccacgtcttgtctatgtctctcgtgaaaagagaccaggctttcagcatcacaagaaggctggtgcaatgaatgcactgattcgtgtatctgctgtgctgacaaatggtgcctatcttctcaatgtggattgtgaccattacttcaatagcagcaaagctcttagagaagcaatgtgcttcatgatggatccagctctaggaaggaaaacttgttatgtacaatttccacaaagatttgatggcattgacttgcacgatcgatatgctaataggaacatagtcttctttgatatcaacatgaaaggtctagatggcattcagggtccagtctatgtgggaacaggatgctgtttcaataggcaggctttgtatggatatgatcctgttttgactgaagctgatctggaacctaacattgttgttaagagctgctgtggtagaaggaagagaaagaacaagagttatatggatagtcaaagccgtattatgaagagaacagaatcttcagctcccatctttaacatggaagacatcgaggagggtattgaaggttatgaggatgaaaggtcagtgcttatgtcccagaggaaattggagaaacgctttggtcagtctccaatcttcattgcatccacctttatgactcaaggtggcataccaccttcaacaaacccagcttctctactgaaggaagctatccatgttatcagctgtgggtacgaggacaaaactgaatggggaaaagagattggctggatctatggttcagttacagaggatattctgactgggtttaaaatgcatgcaagaggctggcaatcaatctactgcatgccaccacgaccttgtttcaagggttctgcaccaatcaatctttctgatcgtcttaatcaggtgctccgttgggctcttgggtcagtggaaattctgcttagcagacattgtcctatatggtatggctacaatgggcgattgaagcttttggagaggctggcttacattaacaccattgtttatccaatcacatctgttccgcttatcgcctattgtgtgcttcctgctatctgtcttcttaccaataaatttatcattcctgagattagtaattatgctggaatgttcttcattcttctttttgcctccattttcgcaactggtatattggagctcagatggagtggtgttggcattgaagattggtggagaaatgagcagttttgggttattggtggcacctctgcccatctcttcgcggtgttccagggtctgctgaaagtgttggctgggattgataccaacttcacagttacctcaaaggcatctgatgaggatggcgactttgctgagctatatgtgttcaagtggaccagtttgctcatccctccgaccactgttcttgtcattaacctggtcggaatggtggcaggaatttcgtatgccattaacagcggctaccaatcctggggtccgctctttggaaagctgttcttctcgatctgggtgatcctccatctctaccccttcctcaagggtctcatgggcaggcagaaccgcacgccaacaatcgtcatcgtttggtccatcctccttgcgtctatcttctccttgctgtgggtgaagatcgatcctttcatctccccgacacagaaagctgccgccttggggcaatgtggtgtgaactgctgatccagattgtgactcttatctgaagaggctcagccaaagatctgccccctcgtgtaaatacctgagggggctagatgggaattttttgttgtagatgaggatggatctgcatccaagttatgcctctgtttattagcttcttcggtgccggtgctgctgcagacaatcatggagcctttctaccttgcttgtagtgctggccagcagcgtaaattgtgaattctgcatttttttatacgtggtgtttattgttttagagtaaattatcatttgtttgaggtaactattcacacgaactatatggcaatgctgttatttatacgcaaagactgatacattcttcggattgtgagcaaacagtcagaacactgtaatctcttaggacaactatataaggcagctgttgtatcatctctattgtttctaatggccgagggatatgtagatgtaaatcacttgcaacatcgtattgttggcagtctgtaatgtttgaaaagcatggagggactgatgcggcgtggtctttcatgaattggggaatcagatggcagtccggtagaacttctgctaccgtattttctgatggcattacctttccagctccaccaactgttcgtgtcgtttttgttggatatttaacctagtttaggtatgtctgatttaagaaatctaaattatgtctatacatttgaggatttctagatattagtattgtgtaatggaccaattcttgggtcgtttatttttcggggcggggggccatcgattctaaatgtagaaccaagcaccctggctgtttt

SEQ ID NO: 3 - DNA, 3723 bp, Artificial Sequence
  cDNA of transcript 2 derived from genomic DNA of Cesa2
gggggagtatgtaatagaggagaaggaaggtgcggagaggaagaggaagcgaagcagcagcagcaccaccactgcgcggcattgcagcgagcaagcgggagggatctggggcatggtggcggtcgctgccgctgccgctcggatctagagggccgcacgggctgattgccctccgccggcctcgtcggtgtcggtggagtgtgaatcggtgtgtgtaggaggagcgcggagatggcggccaacaaggggatggtggcaggctctcacaaccgcaacgagttcgtcatgatccgccacgacggcgacgcgcctgtcccggctaagcccacgaagagtgcgaatgggcaggtctgccagatttgtggcgacactgttggcgtttcagccactggtgatgtctttgttgcctgcaatgagtgtgccttccctgtctgccgcccttgctatgagtacgagcgcaaggaagggaaccaatgctgccctcagtgcaagactagatacaagagacagaaaggtagccctcgagttcatggtgatgatgaggaggaagatgttgatgacctggacaatgaattcaactataagcaaggcaatgggaagggcccagagtggcagcttcaaggagatgacgctgatctgtcttcatctgctcgccatgacccacaccatcggattccacgccttacaagtggacaacagatatctggagagatccctgatgcatcccctgaccgtcattctatccgcagtccaacatcgagctatgttgatccaagcgttccagttcctgtgaggattgtggacccctcgaaggacttgaattcctatgggcttaatagtgttgactggaaggaaagagttgagagctggagggttaaacaggacaaaaatatgttgcaagtgactaataaatatccagaggctagaggagacatggaggggactggctcaaatggagaagatatgcaaatggttgatgatgcacgcctacctttgagccgcattgtgccaatttcctcaaaccagctcaacctttaccggatagtaatcattctccgtcttatcatcctgtgcttcttcttccaatatcgtatcagtcatccagtgcgtaatgcttatggattgtggctagtatctgttatctgtgaggtctggtttgccttgtcctggcttctagatcagttcccaaaatggtatccaatcaaccgtgagacatatctcgacaggcttgcattgaggtatgatagagagggagagccatcacagctggctcccattgatgtctttgtcagtacagtggatccattgaaggaacctccactgatcacagccaacactgttttgtccattcttgctgtggattaccctgttgacaaagtgtcatgctatgtttctgatgatggctcagctatgctgacttttgagtctctctctgaaactgccgaatttgctagaaagtgggttcccttttgtaagaagcacaatattgaaccaagagctccagaattttactttgctcaaaaaatagattacctgaaggacaaaattcaaccttcatttgttaaggaaagacgagcaatgaagagagagtatgaagaattcaaaataagaatcaatgcccttgttgccaaagcacagaaagtgcctgaagaggggtggaccatggctgatggaactgcttggcctgggaataaccctagggaccatcctggcatgattcaggtgttcttggggcacagtggtgggcttgacactgatggaaatgaattaccacgtcttgtctatgtctctcgtgaaaagagaccaggctttcagcatcacaagaaggctggtgcaatgaatgcactggtgggcagattcgtgtatctgctgtgctgacaaatggtgcctatcttctcaatgtggattgtgaccattacttcaatagcagcaaagctcttagagaagcaatgtgcttcatgatggatccagctctaggaaggaaaacttgttatgtacaatttccacaaagatttgatggcattgacttgcacgatcgatatgctaataggaacatagtcttctttgatatcaacatgaaaggtctagatggcattcagggtccagtctatgtgggaacaggatgctgtttcaataggcaggctttgtatggatatgatcctgttttgactgaagctgatctggaacctaacattgttgttaagagctgctgtggtagaaggaagagaaagaacaagagttatatggatagtcaaagccgtattatgaagagaacagaatcttcagctcccatctttaacatggaagacatcgaggagggtattgaaggttatgaggatgaaaggtcagtgcttatgtcccagaggaaattggagaaacgctttggtcagtctccaatcttcattgcatccacctttatgactcaaggtggcataccaccttcaacaaacccagcttctctactgaaggaagctatccatgttatcagctgtgggtacgaggacaaaactgaatggggaaaagagattggctggatctatggttcagttacagaggatattctgactgggtttaaaatgcatgcaagaggctggcaatcaatctactgcatgccaccacgaccttgtttcaagggttctgcaccaatcaatctttctgatcgtcttaatcaggtgctccgttgggctcttgggtcagtggaaattctgcttagcagacattgtcctatatggtatggctacaatgggcgattgaagcttttggagaggctggcttacattaacaccattgtttatccaatcacatctgttccgcttatcgcctattgtgtgcttcctgctatctgtcttcttaccaataaatttatcattcctgagattagtaattatgctggaatgttcttcattcttctttttgcctccattttcgcaactggtatattggagctcagatggagtggtgttggcattgaagattggtggagaaatgagcagttttgggttattggtggcacctctgcccatctcttcgcggtgttccagggtctgctgaaagtgttggctgggattgataccaacttcacagttacctcaaaggcatctgatgaggatggcgactttgctgagctatatgtgttcaagtggaccagtttgctcatccctccgaccactgttcttgtcattaacctggtcggaatggtggcaggaatttcgtatgccattaacagcggctaccaatcctggggtccgctctttggaaagctgttcttctcgatctgggtgatcctccatctctaccccttcctcaagggtctcatgggcaggcagaaccgcacgccaacaatcgtcatcgtttggtccatcctccttgcgtctatcttctccttgctgtgggtgaagatcgatcctttcatctccccgacacagaaagctgccgccttggggcaatgtggtgtgaactgctgatccagattgtgactcttatctgaagaggctcagccaaagatctgccccctcgtgtaaatacctgagggggctagatgggaattttttgttgtagatgaggatggatctgcatccaagttatgcctctgtttattagcttcttcggtgccggtgctgctgcagacaatcatggagcctttctaccttgcttgtagtgctggccagcagcgtaaattgtgaattctgcatttttttatacgtggtgtttattgttttagag

SEQ ID NO: 4 - DNA, 3585 bp, Artificial Sequence
  cDNA of transcript 3 derived from genomic DNA of Cesa2
atgtaatagaggagaaggaaggtgcggagaggaagaggaagcgaagcagcagcagcaccaccactgcgcggcattgcagcgagcaagcgggagggatctggggcatggtggcggtcgctgccgctgccgctcggatctagagggccgcacgggctgattgccctccgccggcctcgtcggtgtcggtggagtgtgaatcggtgtgtgtaggaggagcgcggagatggcggccaacaaggggatggtggcaggctctcacaaccgcaacgagttcgtcatgatccgccacgacggcgacgcgcctgtcccggctaagcccacgaagagtgcgaatgggcaggtctgccagatttgtggcgacactgttggcgtttcagccactggtgatgtctttgttgcctgcaatgagtgtgccttccctgtctgccgcccttgctatgagtacgagcgcaaggaagggaaccaatgctgccctcagtgcaagactagatacaagagacagaaagatatctggagagatccctgatgcatcccctgaccgtcattctatccgcagtccaacatcgagctatgttgatccaagcgttccagttcctgtgaggattgtggacccctcgaaggacttgaattcctatgggcttaatagtgttgactggaaggaaagagttgagagctggagggttaaacaggacaaaaatatgttgcaagtgactaataaatatccagaggctagaggagacatggaggggactggctcaaatggagaagatatgcaaatggttgatgatgcacgcctacctttgagccgcattgtgccaatttcctcaaaccagctcaacctttaccggatagtaatcattctccgtcttatcatcctgtgcttcttcttccaatatcgtatcagtcatccagtgcgtaatgcttatggattgtggctagtatctgttatctgtgaggtctggtttgccttgtcctggcttctagatcagttcccaaaatggtatccaatcaaccgtgagacatatctcgacaggcttgcattgaggtatgatagagagggagagccatcacagctggctcccattgatgtctttgtcagtacagtggatccattgaaggaacctccactgatcacagccaacactgttttgtccattcttgctgtggattaccctgttgacaaagtgtcatgctatgtttctgatgatggctcagctatgctgacttttgagtctctctctgaaactgccgaatttgctagaaagtgggttcccttttgtaagaagcacaatattgaaccaagagctccagaattttactttgctcaaaaaatagattacctgaaggacaaaattcaaccttcatttgttaaggaaagacgagcaatgaagagagagtatgaagaattcaaaataagaatcaatgcccttgttgccaaagcacagaaagtgcctgaagaggggtggaccatggctgatggaactgcttggcctgggaataaccctagggaccatcctggcatgattcaggtgttcttggggcacagtggtgggcttgacactgatggaaatgaattaccacgtcttgtctatgtctctcgtgaaaagagaccaggctttcagcatcacaagaaggctggtgcaatgaatgcactgattcgtgtatctgctgtgctgacaaatggtgcctatcttctcaatgtggattgtgaccattacttcaatagcagcaaagctcttagagaagcaatgtgcttcatgatggatccagctctaggaaggaaaacttgttatgtacaatttccacaaagatttgatggcattgacttgcacgatcgatatgctaataggaacatagtcttctttgatatcaacatgaaaggtctagatggcattcagggtccagtctatgtgggaacaggatgctgtttcaataggcaggctttgtatggatatgatcctgttttgactgaagctgatctggaacctaacattgttgttaagagctgctgtggtagaaggaagagaaagaacaagagttatatggatagtcaaagccgtattatgaagagaacagaatcttcagctcccatctttaacatggaagacatcgaggagggtattgaaggttatgaggatgaaaggtcagtgcttatgtcccagaggaaattggagaaacgctttggtcagtctccaatcttcattgcatccacctttatgactcaaggtggcataccaccttcaacaaacccagcttctctactgaaggaagctatccatgttatcagctgtgggtacgaggacaaaactgaatggggaaaagagattggctggatctatggttcagttacagaggatattctgactgggtttaaaatgcatgcaagaggctggcaatcaatctactgcatgccaccacgaccttgtttcaagggttctgcaccaatcaatctttctgatcgtcttaatcaggtgctccgttgggctcttgggtcagtggaaattctgcttagcagacattgtcctatatggtatggctacaatgggcgattgaagcttttggagaggctggcttacattaacaccattgtttatccaatcacatctgttccgcttatcgcctattgtgtgcttcctgctatctgtcttcttaccaataaatttatcattcctgagattagtaattatgctggaatgttcttcattcttctttttgcctccattttcgcaactggtatattggagctcagatggagtggtgttggcattgaagattggtggagaaatgagcagttttgggttattggtggcacctctgcccatctcttcgcggtgttccagggtctgctgaaagtgttggctgggattgataccaacttcacagttacctcaaaggcatctgatgaggatggcgactttgctgagctatatgtgttcaagtggaccagtttgctcatccctccgaccactgttcttgtcattaacctggtcggaatggtggcaggaatttcgtatgccattaacagcggctaccaatcctggggtccgctctttggaaagctgttcttctcgatctgggtgatcctccatctctaccccttcctcaagggtctcatgggcaggcagaaccgcacgccaacaatcgtcatcgtttggtccatcctccttgcgtctatcttctccttgctgtgggtgaagatcgatcctttcatctccccgacacagaaagctgccgccttggggcaatgtggtgtgaactgctgatccagattgtgactcttatctgaagaggctcagccaaagatctgccccctcgtgtaaatacctgagggggctagatgggaattttttgttgtagatgaggatggatctgcatccaagttatgcctctgtttattagcttcttcggtgccggtgctgctgcagacaatcatggagcctttctaccttgcttgtagtgctggccagcagcgtaaattgtgaattctgcatttttttatacgtggtgtttattgttttagagtaaattatcatttgtttgaggtaactattcacacgaactatatggcaatgctgttatttatac

SEQ ID NO: 5 - DNA, 3849 bp, Artificial Sequence
  cDNA of transcript 4 derived from genomic DNA of Cesa2
gtaatagaggagaaggaaggtgcggagaggaagaggaagcgaagcagcagcagcaccaccactgcgcggcattgcagcgagcaagcgggagggatctggggcatggtggcggtcgctgccgctgccgctcggatctagagggccgcacgggctgattgccctccgccggcctcgtcggtgtcggtggagtgtgaatcggtgtgtgtaggaggagcgcggagatggcggccaacaaggggatggtggcaggctctcacaaccgcaacgagttcgtcatgatccgccacgacggcgacgcgcctgtcccggctaagcccacgaagagtgcgaatgggcaggtctgccagatttgtggcgacactgttggcgtttcagccactggtgatgtctttgttgcctgcaatgagtgtgccttccctgtctgccgcccttgctatgagtacgagcgcaaggaagggaaccaatgctgccctcagtgcaagactagatacaagagacagaaaggtagccctcgagttcatggtgatgatgaggaggaagatgttgatgacctggacaatgaattcaactataagcaaggcaatgggaagggcccagagtggcagcttcaaggagatgacgctgatctgtcttcatctgctcgccatgacccacaccatcggattccacgccttacaagtggacaacagatatctggagagatccctgatgcatcccctgaccgtcattctatccgcagtccaacatcgagctatgttgatccaagcgttccagttcctgtgaggattgtggacccctcgaaggacttgaattcctatgggcttaatagtgttgactggaaggaaagagttgagagctggagggttaaacaggacaaaaatatgttgcaagtgactaataaatatccagaggctagaggagacatggaggggactggctcaaatggagaagatatggttgatgatgcacgcctacctttgagccgcattgtgccaatttcctcaaaccagctcaacctttaccggatagtaatcattctccgtcttatcatcctgtgcttcttcttccaatatcgtatcagtcatccagtgcgtaatgcttatggattgtggctagtatctgttatctgtgaggtctggtttgccttgtcctggcttctagatcagttcccaaaatggtatccaatcaaccgtgagacatatctcgacaggcttgcattgaggtatgatagagagggagagccatcacagctggctcccattgatgtctttgtcagtacagtggatccattgaaggaacctccactgatcacagccaacactgttttgtccattcttgctgtggattaccctgttgacaaagtgtcatgctatgtttctgatgatggctcagctatgctgacttttgagtctctctctgaaactgccgaatttgctagaaagtgggttcccttttgtaagaagcacaatattgaaccaagagctccagaattttactttgctcaaaaaatagattacctgaaggacaaaattcaaccttcatttgttaaggaaagacgagcaatgaagagagagtatgaagaattcaaaataagaatcaatgcccttgttgccaaagcacagaaagtgcctgaagaggggtggaccatggctgatggaactgcttggcctgggaataaccctagggaccatcctggcatgattcaggtgttcttggggcacagtggtgggcttgacactgatggaaatgaattaccacgtcttgtctatgtctctcgtgaaaagagaccaggctttcagcatcacaagaaggctggtgcaatgaatgcactgattcgtgtatctgctgtgctgacaaatggtgcctatcttctcaatgtggattgtgaccattacttcaatagcagcaaagctcttagagaagcaatgtgcttcatgatggatccagctctaggaaggaaaacttgttatgtacaatttccacaaagatttgatggcattgacttgcacgatcgatatgctaataggaacatagtcttctttgatatcaacatgaaaggtctagatggcattcagggtccagtctatgtgggaacaggatgctgtttcaataggcaggctttgtatggatatgatcctgttttgactgaagctgatctggaacctaacattgttgttaagagctgctgtggtagaaggaagagaaagaacaagagttatatggatagtcaaagccgtattatgaagagaacagaatcttcagctcccatctttaacatggaagacatcgaggagggtattgaaggttatgaggatgaaaggtcagtgcttatgtcccagaggaaattggagaaacgctttggtcagtctccaatcttcattgcatccacctttatgactcaaggtggcataccaccttcaacaaacccagcttctctactgaaggaagctatccatgttatcagctgtgggtacgaggacaaaactgaatggggaaaagagattggctggatctatggttcagttacagaggatattctgactgggtttaaaatgcatgcaagaggctggcaatcaatctactgcatgccaccacgaccttgtttcaagggttctgcaccaatcaatctttctgatcgtcttaatcaggtgctccgttgggctcttgggtcagtggaaattctgcttagcagacattgtcctatatggtatggctacaatgggcgattgaagcttttggagaggctggcttacattaacaccattgtttatccaatcacatctgttccgcttatcgcctattgtgtgcttcctgctatctgtcttcttaccaataaatttatcattcctgagattagtaattatgctggaatgttcttcattcttctttttgcctccattttcgcaactggtatattggagctcagatggagtggtgttggcattgaagattggtggagaaatgagcagttttgggttattggtggcacctctgcccatctcttcgcggtgttccagggtctgctgaaagtgttggctgggattgataccaacttcacagttacctcaaaggcatctgatgaggatggcgactttgctgagctatatgtgttcaagtggaccagtttgctcatccctccgaccactgttcttgtcattaacctggtcggaatggtggcaggaatttcgtatgccattaacagcggctaccaatcctggggtccgctctttggaaagctgttcttctcgatctgggtgatcctccatctctaccccttcctcaagggtctcatgggcaggcagaaccgcacgccaacaatcgtcatcgtttggtccatcctccttgcgtctatcttctccttgctgtgggtgaagatcgatcctttcatctccccgacacagaaagctgccgccttggggcaatgtggtgtgaactgctgatccagattgtgactcttatctgaagaggctcagccaaagatctgccccctcgtgtaaatacctgagggggctagatgggaattttttgttgtagatgaggatggatctgcatccaagttatgcctctgtttattagcttcttcggtgccggtgctgctgcagacaatcatggagcctttctaccttgcttgtagtgctggccagcagcgtaaattgtgaattctgcatttttttatacgtggtgtttattgttttagagtaaattatcatttgtttgaggtaactattcacacgaactatatggcaatgctgttatttatacgcaaagactgatacattcttcggattgtgagcaaacagtcagaacactgtaatctcttaggacaactatataaggcagctgttgtat

SEQ ID NO: 6 - DNA, 3844 bp, Artificial Sequence
  cDNA of transcript 5 derived from genomic DNA of Cesa2
aggagaaggaaggtgcggagaggaagaggaagcgaagcagcagcagcaccaccactgcgcggcattgcagcgagcaagcgggagggatctggggcatggtggcggtcgctgccgctgccgctcggatctagagggccgcacgggctgattgccctccgccggcctcgtcggtgtcggtggagtgtgaatcggtgtgtgtaggaggagcgcggagatggcggccaacaaggggatggtggcaggctctcacaaccgcaacgagttcgtcatgatccgccacgacggcgacgcgcctgtcccggctaagcccacgaagagtgcgaatgggcaggtctgccagatttgtggcgacactgttggcgtttcagccactggtgatgtctttgttgcctgcaatgagtgtgccttccctgtctgccgcccttgctatgagtacgagcgcaaggaagggaaccaatgctgccctcagtgcaagactagatacaagagacagaaaggtagccctcgagttcatggtgatgatgaggaggaagatgttgatgacctggacaatgaattcaactataagcaaggcaatgggaagggcccagagtggcagcttcaaggagatgacgctgatctgtcttcatctgctcgccatgacccacaccatcggattccacgccttacaagtggacaacagatatctggagagatccctgatgcatcccctgaccgtcattctatccgcagtccaacatcgagctatgttgatccaagcgttccagttcctgtgaggattgtggacccctcgaaggacttgaattcctatgggcttaatagtgttgactggaaggaaagagttgagagctggagggttaaacaggacaaaaatatgttgcaagtgactaataaatatccagaggctagaggagacatggaggggactggctcaaatggagaagatatgcaaggttgatgatgcacgcctacctttgagccgcattgtgccaatttcctcaaaccagctcaacctttaccggatagtaatcattctccgtcttatcatcctgtgcttcttcttccaatatcgtatcagtcatccagtgcgtaatgcttatggattgtggctagtatctgttatctgtgaggtctggtttgccttgtcctggcttctagatcagttcccaaaatggtatccaatcaaccgtgagacatatctcgacaggcttgcattgaggtatgatagagagggagagccatcacagctggctcccattgatgtctttgtcagtacagtggatccattgaaggaacctccactgatcacagccaacactgttttgtccattcttgctgtggattaccctgttgacaaagtgtcatgctatgtttctgatgatggctcagctatgctgacttttgagtctctctctgaaactgccgaatttgctagaaagtgggttcccttttgtaagaagcacaatattgaaccaagagctccagaattttactttgctcaaaaaatagattacctgaaggacaaaattcaaccttcatttgttaaggaaagacgagcaatgaagagagagtatgaagaattcaaaataagaatcaatgcccttgttgccaaagcacagaaagtgcctgaagaggggtggaccatggctgatggaactgcttggcctgggaataaccctagggaccatcctggcatgattcaggtgttcttggggcacagtggtgggcttgacactgatggaaatgaattaccacgtcttgtctatgtctctcgtgaaaagagaccaggctttcagcatcacaagaaggctggtgcaatgaatgcactgattcgtgtatctgctgtgctgacaaatggtgcctatcttctcaatgtggattgtgaccattacttcaatagcagcaaagctcttagagaagcaatgtgcttcatgatggatccagctctaggaaggaaaacttgttatgtacaatttccacaaagatttgatggcattgacttgcacgatcgatatgctaataggaacatagtcttctttgatatcaacatgaaaggtctagatggcattcagggtccagtctatgtgggaacaggatgctgtttcaataggcaggctttgtatggatatgatcctgttttgactgaagctgatctggaacctaacattgttgttaagagctgctgtggtagaaggaagagaaagaacaagagttatatggatagtcaaagccgtattatgaagagaacagaatcttcagctcccatctttaacatggaagacatcgaggagggtattgaaggttatgaggatgaaaggtcagtgcttatgtcccagaggaaattggagaaacgctttggtcagtctccaatcttcattgcatccacctttatgactcaaggtggcataccaccttcaacaaacccagcttctctactgaaggaagctatccatgttatcagctgtgggtacgaggacaaaactgaatggggaaaagagattggctggatctatggttcagttacagaggatattctgactgggtttaaaatgcatgcaagaggctggcaatcaatctactgcatgccaccacgaccttgtttcaagggttctgcaccaatcaatctttctgatcgtcttaatcaggtgctccgttgggctcttgggtcagtggaaattctgcttagcagacattgtcctatatggtatggctacaatgggcgattgaagcttttggagaggctggcttacattaacaccattgtttatccaatcacatctgttccgcttatcgcctattgtgtgcttcctgctatctgtcttcttaccaataaatttatcattcctgagattagtaattatgctggaatgttcttcattcttctttttgcctccattttcgcaactggtatattggagctcagatggagtggtgttggcattgaagattggtggagaaatgagcagttttgggttattggtggcacctctgcccatctcttcgcggtgttccagggtctgctgaaagtgttggctgggattgataccaacttcacagttacctcaaaggcatctgatgaggatggcgactttgctgagctatatgtgttcaagtggaccagtttgctcatccctccgaccactgttcttgtcattaacctggtcggaatggtggcaggaatttcgtatgccattaacagcggctaccaatcctggggtccgctctttggaaagctgttcttctcgatctgggtgatcctccatctctaccccttcctcaagggtctcatgggcaggcagaaccgcacgccaacaatcgtcatcgtttggtccatcctccttgcgtctatcttctccttgctgtgggtgaagatcgatcctttcatctccccgacacagaaagctgccgccttggggcaatgtggtgtgaactgctgatccagattgtgactcttatctgaagaggctcagccaaagatctgccccctcgtgtaaatacctgagggggctagatgggaattttttgttgtagatgaggatggatctgcatccaagttatgcctctgtttattagcttcttcggtgccggtgctgctgcagacaatcatggagcctttctaccttgcttgtagtgctggccagcagcgtaaattgtgaattctgcatttttttatacgtggtgtttattgttttagagtaaattatcatttgtttgaggtaactattcacacgaactatatggcaatgctgttatttatacgcaaagactgatacattcttcggattgtgagcaaacagtcagaacactgtaatctcttaggacaactatataaggcagctgttgt

SEQ ID NO: 7 - DNA, 3947 bp, Artificial Sequence
  cDNA of transcript 6 derived from genomic DNA of Cesa2
gaggaagaggaagcgaagcagcagcagcaccaccactgcgcggcattgcagcgagcaagcgggagggatctggggcatggtggcggtcgctgccgctgccgctcggatctagagggccgcacgggctgattgccctccgccggcctcgtcggtgtcggtggagtgtgaatcggtgtgtgtaggaggagcgcggagatggcggccaacaaggggatggtggcaggctctcacaaccgcaacgagttcgtcatgatccgccacgacggcgacgcgcctgtcccggctaagcccacgaagagtgcgaatgggcaggtctgccagatttgtggcgacactgttggcgtttcagccactggtgatgtctttgttgcctgcaatgagtgtgccttccctgtctgccgcccttgctatgagtacgagcgcaaggaagggaaccaatgctgccctcagtgcaagactagatacaagagacagaaaggtagccctcgagttcatggtgatgatgaggaggaagatgttgatgacctggacaatgaattcaactataagcaaggcaatgggaagggcccagagtggcagcttcaaggagatgacgctgatctgtcttcatctgctcgccatgacccacaccatcggattccacgccttacaagtggacaacagatatctggagagatccctgatgcatcccctgaccgtcattctatccgcagtccaacatcgagctatgttgatccaagcgttccagttcctgtgaggattgtggacccctcgaaggacttgaattcctatgggcttaatagtgttgactggaaggaaagagttgagagctggagggttaaacaggacaaaaatatgttgcaagtgactaataaatatccagaggctagaggagacatggaggggactggctcaaatggagaagatatgcaaatggttgatgatgcacgcctacctttgagccgcattgtgccaatttcctcaaaccagctcaacctttaccggatagtaatcattctccgtcttatcatcctgtgcttcttcttccaatatcgtatcagtcatccagtgcgtaatgcttatggattgtggctagtatctgttatctgtgaggtctggtttgccttgtcctggcttctagatcagttcccaaaatggtatccaatcaaccgtgagacatatctcgacaggcttgcattgaggtatgatagagagggagagccatcacagctggctcccattgatgtctttgtcagtacagtggatccattgaaggaacctccactgatcacagccaacactgttttgtccattcttgctgtggattaccctgttgacaaagtgtcatgctatgtttctgatgatggctcagctatgctgacttttgagtctctctctgaaactgccgaatttgctagaaagtgggttcccttttgtaagaagcacaatattgaaccaagagctccagaattttactttgctcaaaaaatagattacctgaaggacaaaattcaaccttcatttgttaaggaaagacgagcaatgaagagagtatgaagaattcaaaataagaatcaatgcccttgttgccaaagcacagaaagtgcctgaagaggggtggaccatggctgatggaactgcttggcctgggaataaccctagggaccatcctggcatgattcaggtgttcttggggcacagtggtgggcttgacactgatggaaatgaattaccacgtcttgtctatgtctctcgtgaaaagagaccaggctttcagcatcacaagaaggctggtgcaatgaatgcactgattcgtgtatctgctgtgctgacaaatggtgcctatcttctcaatgtggattgtgaccattacttcaatagcagcaaagctcttagagaagcaatgtgcttcatgatggatccagctctaggaaggaaaacttgttatgtacaatttccacaaagatttgatggcattgacttgcacgatcgatatgctaataggaacatagtcttctttgatatcaacatgaaaggtctagatggcattcagggtccagtctatgtgggaacaggatgctgtttcaataggcaggctttgtatggatatgatcctgttttgactgaagctgatctggaacctaacattgttgttaagagctgctgtggtagaaggaagagaaagaacaagagttatatggatagtcaaagccgtattatgaagagaacagaatcttcagctcccatctttaacatggaagacatcgaggagggtattgaaggttatgaggatgaaaggtcagtgcttatgtcccagaggaaattggagaaacgctttggtcagtctccaatcttcattgcatccacctttatgactcaaggtggcataccaccttcaacaaacccagcttctctactgaaggaagctatccatgttatcagctgtgggtacgaggacaaaactgaatggggaaaagagattggctggatctatggttcagttacagaggatattctgactgggtttaaaatgcatgcaagaggctggcaatcaatctactgcatgccaccacgaccttgtttcaagggttctgcaccaatcaatctttctgatcgtcttaatcaggtgctccgttgggctcttgggtcagtggaaattctgcttagcagacattgtcctatatggtatggctacaatgggcgattgaagcttttggagaggctggcttacattaacaccattgtttatccaatcacatctgttccgcttatcgcctattgtgtgcttcctgctatctgtcttcttaccaataaatttatcattcctgagattagtaattatgctggaatgttcttcattcttctttttgcctccattttcgcaactggtatattggagctcagatggagtggtgttggcattgaagattggtggagaaatgagcagttttgggttattggtggcacctctgcccatctcttcgcggtgttccagggtctgctgaaagtgttggctgggattgataccaacttcacagttacctcaaaggcatctgatgaggatggcgactttgctgagctatatgtgttcaagtggaccagtttgctcatccctccgaccactgttcttgtcattaacctggtcggaatggtggcaggaatttcgtatgccattaacagcggctaccaatcctggggtccgctctttggaaagctgttcttctcgatctgggtgatcctccatctctaccccttcctcaagggtctcatgggcaggcagaaccgcacgccaacaatcgtcatcgtttggtccatcctccttgcgtctatcttctccttgctgtgggtgaagatcgatcctttcatctccccgacacagaaagctgccgccttggggcaatgtggtgtgaactgctgatccagattgtgactcttatctgaagaggctcagccaaagatctgccccctcgtgtaaatacctgagggggctagatgggaattttttgttgtagatgaggatggatctgcatccaagttatgcctctgtttattagcttcttcggtgccggtgctgctgcagacaatcatggagcctttctaccttgcttgtagtgctggccagcagcgtaaattgtgaattctgcatttttttatacgtggtgtttattgttttagagtaaattatcatttgtttgaggtaactattcacacgaactatatggcaatgctgttatttatacgcaaagactgatacattcttcggattgtgagcaaacagtcagaacactgtaatctcttaggacaactatataaggcagctgttgtatcatctctattgtttctaatggccgagggatatgtagatgtaaatcacttgcaacatcgtattgttggcagtctgtaatgtttgaaaagcatggagggactgatgcggcgtggtctttcat

SEQ ID NO: 8 - DNA, 3661 bp, Artificial Sequence
  cDNA of transcript 7 derived from genomic DNA of Cesa2
atggtggcggtcgctgccgctgccgctcggatctagagggccgcacgggctgattgccctccgccggcctcgtcggtgtcggtggagtgtgaatcggtgtgtgtaggaggagcgcggagatggcggccaacaaggggatggtggcaggctctcacaaccgcaacgagttcgtcatgatccgccacgacggcgacgcgcctgtcccggctaagcccacgaagagtgcgaatgggcaggtctgccagatttgtggcgacactgttggcgtttcagccactggtgatgtctttgttgcctgcaatgagtgtgccttccctgtctgccgcccttgctatgagtacgagcgcaaggaagggaaccaatgctgccctcagtgcaagactagatacaagagacagaaaggtagccctcgagttcatggtgatgatgaggaggaagatgttgatgacctggacaatgaattcaactataagcaaggcaatgggaagggcccagagtggcagcttcaaggagatgacgctgatctgtcttcatctgctcgccatgacccacaccatcggattccacgccttacaagtggacaacagatatctggagagatccctgatgcatcccctgaccgtcattctatccgcagtccaacatcgagctatgttgatccaagcgttccagttcctgtgaggattgtggacccctcgaaggacttgaattcctatgggcttaatagtgttgactggaaggaaagagttgagagctggagggttaaacaggacaaaaatatgttgcaagtgactaataaatatccagaggctagaggagacatggaggggactggctcaaatggagaagatatgcaaatggttgatgatgcacgcctacctttgagccgcattgtgccaatttcctcaaaccagctcaacctttaccggatagtaatcattctccgtcttatcatcctgtgcttcttcttccaatatcgtatcagtcatccagtgcgtaatgcttatggattgtggctagtatctgttatctgtgaggtctggtttgccttgtcctggcttctagatcagttcccaaaatggtatccaatcaaccgtgagacatatctcgacaggcttgcattgaggtatgatagagagggagagccatcacagctggctcccattgatgtctttgtcagtacagtggatccattgaaggaacctccactgatcacagccaacactgttttgtccattcttgctgtggattaccctgttgacaaagtgtcatgctatgtttctgatgatggctcagctatgctgacttttgagtctctctctgaaactgccgaatttgctagaaagtgggttcccttttgtaagaagcacaatattgaaccaagagctccagaattttactttgctcaaaaaatagattacctgaaggacaaaattcaaccttcatttgttaaggaaagacgagcaatgaagagagagtatgaagaattcaaaataagaatcaatgcccttgttgccaaagcacagaaagtgcctgaagaggggtggaccatggctgatggaactgcttggcctgggaataaccctagggaccatcctggcatgattcaggtgttcttggggcacagtggtgggcttgacactgatggaaatgaattaccacgtcttgtctatgtctctcgtgaaaagagaccaggctttcagcatcacaagaaggctggtgcaatgaatgcactgattcgtgtatctgctgtgctgacaaatggtgcctatcttctcaatgtggattgtgaccattacttcaatagcagcaaagctcttagagaagcaatgtgcttcatgatggatccagctctaggaaggaaaacttgttatgtacaatttccacaaagatttgatggcattgacttgcacgatcgatatgctaataggaacatagtcttctttgatatcaacatgaaaggtctagatggcattcagggtccagtctatgtgggaacaggatgctgtttcaataggcaggctttgtatggatatgatcctgttttgactgaagctgatctggaacctaacattgttgttaagagctgctgtggtagaaggaagagaaagaacaagagttatatggatagtcaaagccgtattatgaagagaacagaatcttcagctcccatctttaacatggaagacatcgaggagggtattgaaggttatgaggatgaaaggtcagtgcttatgtcccagaggaaattggagaaacgctttggtcagtctccaatcttcattgcatccacctttatgactcaaggtggcataccaccttcaacaaacccagcttctctactgaaggaagctatccatgttatcagctgtgggtacgaggacaaaactgaatggggaaaagagattggctggatctatggttcagttacagaggatattctgactgggtttaaaatgcatgcaagaggctggcaatcaatctactgcatgccaccacgaccttgtttcaagggttctgcaccaatcaatctttctgatcgtcttaatcaggtgctccgttgggctcttgggtcagtggaaattctgcttagcagacattgtcctatatggtatggctacaatgggcgattgaagcttttggagaggctggcttacattaacaccattgtttatccaatcacatctgttccgcttatcgcctattgtgtgcttcctgctatctgtcttcttaccaataaatttatcattcctgagtaattatgctggaatgttcttcattcttctttttgcctccattttcgcaactggtatattggagctcagatggagtggtgttggcattgaagattggtggagaaatgagcagttttgggttattggtggcacctctgcccatctcttcgcggtgttccagggtctgctgaaagtgttggctgggattgataccaacttcacagttacctcaaaggcatctgatgaggatggcgactttgctgagctatatgtgttcaagtggaccagtttgctcatccctccgaccactgttcttgtcattaacctggtcggaatggtggcaggaatttcgtatgccattaacagcggctaccaatcctggggtccgctctttggaaagctgttcttctcgatctgggtgatcctccatctctaccccttcctcaagggtctcatgggcaggcagaaccgcacgccaacaatcgtcatcgtttggtccatcctccttgcgtctatcttctccttgctgtgggtgaagatcgatcctttcatctccccgacacagaaagctgccgccttggggcaatgtggtgtgaactgctgatccagattgtgactcttatctgaagaggctcagccaaagatctgccccctcgtgtaaatacctgagggggctagatgggaattttttgttgtagatgaggatggatctgcatccaagttatgcctctgtttattagcttcttcggtgccggtgctgctgcagacaatcatggagcctttctaccttgcttgtagtgctggccagcagcgtaaattgtgaattctgcatttttttatacgtggtgtttattgttttagagtaaattatcatttgtttgaggtaactattcacacgaactatatggcaatgctgttatttatac

SEQ ID NO: 9 - DNA, 3402 bp, Artificial Sequence
  cDNA of transcript 8 derived from genomic DNA of Cesa2
gcaagactagatacaagagacagaaaggtagccctcgagttcatggtgatgatgaggaggaagatgttgatgacctggacaatgaattcaactataagcaaggcaatgggaagggcccagagtggcagcttcaaggagatgacgctgatctgtcttcatctgctcgccatgacccacaccatcggattccacgccttacaagtggacaacagatatctggagagatccctgatgcatcccctgaccgtcattctatccgcagtccaacatcgagctatgttgatccaagcgttccagttcctgtgaggattgtggacccctcgaaggacttgaattcctatgggcttaatagtgttgactggaaggaaagagttgagagctggagggttaaacaggacaaaaatatgttgcaagtgactaataaatatccagaggctagaggagacatggaggggactggctcaaatggagaagatatgcaaatggttgatgatgcacgcctacctttgagccgcattgtgccaatttcctcaaaccagctcaacctttaccggatagtaatcattctccgtcttatcatcctgtgcttcttcttccaatatcgtatcagtcatccagtgcgtaatgcttatggattgtggctagtatctgttatctgtgaggtctggtttgccttgtcctggcttctagatcagttcccaaaatggtatccaatcaaccgtgagacatatctcgacaggcttgcattgaggtatgatagagagggagagccatcacagctggctcccattgatgtctttgtcagtacagtggatccattgaaggaacctccactgatcacagccaacactgttttgtccattcttgctgtggattaccctgttgacaaagtgtcatgctatgtttctgatgatggctcagctatgctgacttttgagtctctctctgaaactgccgaatttgctagaaagtgggttcccttttgtaagaagcacaatattgaaccaagagctccagaattttactttgctcaaaaaatagattacctgaaggacaaaattcaaccttcatttgttaaggaaagacgagcaatgaagagagagtatgaagaattcaaaataagaatcaatgcccttgttgccaaagcacagaaagtgcctgaagaggggtggaccatggctgatggaactgcttggcctgggaataaccctagggaccatcctggcatgattcaggtgttcttggggcacagtggtgggcttgacactgatggaaatgaattaccacgtcttgtctatgtctctcgtgaaaagagaccaggctttcagcatcacaagaaggctggtgcaatgaatgcactgattcgtgtatctgctgtgctgacaaatggtgcctatcttctcaatgtggattgtgaccattacttcaatagcagcaaagctcttagagaagcaatgtgcttcatgatggatccagctctaggaaggaaaacttgttatgtacaatttccacaaagatttgatggcattgacttgcacgatcgatatgctaataggaacatagtcttctttgatatcaacatgaaaggtctagatggcattcagggtccagtctatgtgggaacaggatgctgtttcaataggcaggctttgtatggatatgatcctgttttgactgaagctgatctggaacctaacattgttgttaagagctgctgtggtagaaggaagagaaagaacaagagttatatggatagtcaaagccgtattatgaagagaacagaatcttcagctcccatctttaacatggaagacatcgaggagggtattgaagatctcagttttggaatcccattaggttatgaggatgaaaggtcagtgcttatgtcccagaggaaattggagaaacgctttggtcagtctccaatcttcattgcatccacctttatgactcaaggtggcataccaccttcaacaaacccagcttctctactgaaggaagctatccatgttatcagctgtgggtacgaggacaaaactgaatggggaaaagagattggctggatctatggttcagttacagaggatattctgactgggtttaaaatgcatgcaagaggctggcaatcaatctactgcatgccaccacgaccttgtttcaagggttctgcaccaatcaatctttctgatcgtcttaatcaggtgctccgttgggctcttgggtcagtggaaattctgcttagcagacattgtcctatatggtatggctacaatgggcgattgaagcttttggagaggctggcttacattaacaccattgtttatccaatcacatctgttccgcttatcgcctattgtgtgcttcctgctatctgtcttcttaccaataaatttatcattcctgagattagtaattatgctggaatgttcttcattcttctttttgcctccattttcgcaactggtatattggagctcagatggagtggtgttggcattgaagattggtggagaaatgagcagttttgggttattggtggcacctctgcccatctcttcgcggtgttccagggtctgctgaaagtgttggctgggattgataccaacttcacagttacctcaaaggcatctgatgaggatggcgactttgctgagctatatgtgttcaagtggaccagtttgctcatccctccgaccactgttcttgtcattaacctggtcggaatggtggcaggaatttcgtatgccattaacagcggctaccaatcctggggtccgctctttggaaagctgttcttctcgatctgggtgatcctccatctctaccccttcctcaagggtctcatgggcaggcagaaccgcacgccaacaatcgtcatcgtttggtccatcctccttgcgtctatcttctccttgctgtgggtgaagatcgatcctttcatctccccgacacagaaagctgccgccttggggcaatgtggtgtgaactgctgatccagattgtgactcttatctgaagaggctcagccaaagatctgccccctcgtgtaaatacctgagggggctagatgggaattttttgttgtagatgaggatggatctgcatccaagttatgcctctgtttattagcttcttcggtgccggtgctgctgcagacaatcatggagcctttctaccttgcttgtagtgctggccagcagcgtaaattgtgaattctgcatttttttatacgtggtgtttattgttttagagtaaattatcatttgtttgaggtaactattcacacgaactatatggcaatgctgttatttatacgcaaagactgatacattcttcggattgtgagcaaacagtcagaacactgtaatctcttaggacaactatataaggcagctgttgtat

SEQ ID NO: 10 - DNA, 3725 bp, Artificial Sequence
  cDNA of transcript 9 derived from genomic DNA of Cesa2
gcagcagcagcaccaccactgcgcggcattgcagcgagcaagcgggagggatctggggcatggtggcggtcgctgccgctgccgctcggatctagagggccgcacgggctgattgccctccgccggcctcgtcggtgtcggtggagtgtgaatcggtgtgtgtaggaggagcgcggagatggcggccaacaaggggatggtggcaggctctcacaaccgcaacgagttcgtcatgatccgccacgacggcgacgcgcctgtcccggctaagcccacgaagagtgcgaatgggcaggtctgccagatttgtggcgacactgttggcgtttcagccactggtgatgtctttgttgcctgcaatgagtgtgccttccctgtctgccgcccttgctatgagtacgagcgcaaggaagggaaccaatgctgccctcagtgcaagactagatacaagagacagaaaggtagccctcgagttcatggtgatgatgaggaggaagatgttgatgacctggacaatgaattcaactataagcaaggcaatgggaagggcccagagtggcagcttcaaggagatgacgctgatctgtcttcatctgctcgccatgacccacaccatcggattccacgccttacaagtggacaacagatatctggagagatccctgatgcatcccctgaccgtcattctatccgcagtccaacatcgagctatgttgatccaagcgttccagttcctgtgaggattgtggacccctcgaaggacttgaattcctatgggcttaatagtgttgactggaaggaaagagttgagagctggagggttaaacaggacaaaaatatgttgcaagtgactaataaatatccagaggctagaggagacatggaggggactggctcaaatggagaagatatgcaaatggttgatgatgcacgcctacctttgagccgcattgtgccaatttcctcaaaccagctcaacctttaccggatagtaatcattctccgtcttatcatcctgtgcttcttcttccaatatcgtatcagtcatccagtgcgtaatgcttatggattgtggctagtatctgttatctgtgaggtctggtttgccttgtcctggcttctagatcagttcccaaaatggtatccaatcaaccgtgagacatatctcgacaggcttgcattgaggtatgatagagagggagagccatcacagctggctcccattgatgtctttgtcagtacagtggatccattgaaggaacctccactgatcacagccaacactgttttgtccattcttgctgtggattaccctgttgacaaagtgtcatgctatgtttctgatgatggctcagctatgctgacttttgagtctctctctgaaactgccgaatttgctagaaagtgggttcccttttgtaagaagcacaatattgaaccaagagctccagaattttactttgctcaaaaaatagattacctgaaggacaaaattcaaccttcatttgttaaggaaagacgagcaatgaagagagagtatgaagaattcaaaataagaatcaatgcccttgttgccaaagcacagaaagtgcctgaagaggggtggaccatggctgatggaactgcttggcctgggaataaccctagggaccatcctggcatgattcaggtgttcttggggcacagtggtgggcttgacactgatggaaatgaattaccacgtcttgtctatgtctctcgtgaaaagagaccaggctttcagcatcacaagaaggctggtgcaatgaatgcactgattcgtgtatctgctgtgctgacaaatggtgcctatcttctcaatgtggattgtgaccattacttcaatagcagcaaagctcttagagaagcaatgtgcttcatgatggatccagctctaggaaggaaaacttgttatgtacaatttccacaaagatttgatggcattgacttgcacgatcgatatgctaataggaacatagtcttctttgatatcaacatgaaaggtctagatggcattcagggtccagtctatgtgggaacaggatgctgtttcaataggcaggctttgtatggatatgatcctgttttgactgaagctgatctggaacctaacattgttgttaagagctgctgtggtagaaggaagagaaagaacaagagttatatggatagtcaaagccgtattatgaagagaacagaatcttcagctcccatctttaacatggaagacatcgaggagggtattgaaggttatgaggatgaaaggtcagtgcttatgtcccagaggaaattggagaaacgctttggtcagtctccaatcttcattgcatccacctttatgactcaaggtggcataccaccttcaacaaacccagcttctctactgaaggaagctatccatgttatcagctgtgggtacgaggacaaaactgaatggggaaaagagattggctggatctatggttcagttacagaggatattctgactgggtttaaaatgcatgcaagaggctggcaatcaatctactgcatgccaccacgaccttgtttcaagggttctgcaccaatcaatctttctgatcgtcttaatcaggtgctccgttgggctcttgggtcagtggaaattctgcttagcagacattgtcctatatggtatggctacaatgggcgattgaagcttttggagaggctggcttacattaacaccattgtttatccaatcacatctgttccgcttatcgcctattgtgtgcttcctgctatctgtcttcttaccaataaatttatcattcctgagattagtaattatgctggaatgttcttcattcttctttttgcctccattttcgcaactggtatattggagctcagatggagtggtgttggcattgaagattggtggagaaatgagcagttttgggttattggtggcacctctgcccatctcttcgcggtgttccagggtctgctgaaagtgttggctgggattgataccaacttcacagttacctcaaaggcatctgatgaggatggcgactttgctgagctatatgtgttcaagtggaccagtttgctcatccctccgaccactgttcttgtcattaacctggtcggaatggtggcaggaatttcgtatgccattaacagcggctaccaatcctggggtccgctctttggaaagctgttcttctcgatctgggtgatcctccatctctaccccttcctcaagggtctcatgggcaggcagaaccgcacgccaacaatcgtcatcgtttggtccatcctccttgcgtctatcttctccttgctgtgggtgaagatcgatcctttcatctccccgacacagaaagctgccgccttggggcaatgtggtgtgaactgctgatccagattgtgactcttatctgaagaggctcagccaaagatctgccccctcgtgtaaatacctgagggggctagatgggaattttttgttgtagatgaggatggatctgcatccaagttatgcctctgtttattagcttcttcggtgccggtgctgctgcagacaatcatggagcctttctaccttgcttgtagtgctggccagcagcgtaaattgtgaattctgcatttttttatacgtggtgtttattgttttagagtaaattatcatttgtttgaggtaactattcacacgaactatatggcaatgctgttatttaaaa

SEQ ID NO: 11 - protein, 1074 aa, Zea mays
MAANKGMVAGSHNRNEFVMIRHDGDAPVPAKPTKSANGQVCQICGDTVGVSATGDVFVACNECAFPVCRPCYEYERKEGNQCCPQCKTRYKRQKGSPRVHGDDEEEDVDDLDNEFNYKQGNGKGPEWQLQGDDADLSSSARHDPHHRIPRLTSGQQISGEIPDASPDRHSIRSPTSSYVDPSVPVPVRIVDPSKDLNSYGLNSVDWKERVESWRVKQDKNMLQVTNKYPEARGDMEGTGSNGEDMQMVDDARLPLSRIVPISSNQLNLYRIVIILRLIILCFFFQYRISHPVRNAYGLWLVSVICEVWFALSWLLDQFPKWYPINRETYLDRLALRYDREGEPSQLAPIDVFVSTVDPLKEPPLITANTVLSILAVDYPVDKVSCYVSDDGSAMLTFESLSETAEFARKWVPFCKKHNIEPRAPEFYFAQKIDYLKDKIQPSFVKERRAMKREYEEFKIRINALVAKAQKVPEEGWTMADGTAWPGNNPRDHPGMIQVFLGHSGGLDTDGNELPRLVYVSREKRPGFQHHKKAGAMNALIRVSAVLTNGAYLLNVDCDHYFNSSKALREAMCFMMDPALGRKTCYVQFPQRFDGIDLHDRYANRNIVFFDINMKGLDGIQGPVYVGTGCCFNRQALYGYDPVLTEADLEPNIVVKSCCGRRKRKNKSYMDSQSRIMKRTESSAPIFNMEDIEEGIEGYEDERSVLMSQRKLEKRFGQSPIFIASTFMTQGGIPPSTNPASLLKEAIHVISCGYEDKTEWGKEIGWIYGSVTEDILTGFKMHARGWQSIYCMPPRPCFKGSAPINLSDRLNQVLRWALGSVEILLSRHCPIWYGYNGRLKLLERLAYINTIVYPITSVPLIAYCVLPAICLLTNKFIIPEISNYAGMFFILLFASIFATGILELRWSGVGIEDWWRNEQFWVIGGTSAHLFAVFQGLLKVLAGIDTNFTVTSKASDEDGDFAELYVFKWTSLLIPPTTVLVINLVGMVAGISYAINSGYQSWGPLFGKLFFSIWVILHLYPFLKGLMGRQNRTPTIVIVWSILLASIFSLLWVKIDPFISPTQKAAALGQCGVNC

SEQ ID NO: 12 - protein, 548 aa, Zea mays
MAANKGMVAGSHNRNEFVMIRHDGDAPVPAKPTKSANGQVCQICGDTVGVSATGDVFVACNECAFPVCRPCYEYERKEGNQCCPQCKTRYKRQKGSPRVHGDDEEEDVDDLDNEFNYKQGNGKGPEWQLQGDDADLSSSARHDPHHRIPRLTSGQQISGEIPDASPDRHSIRSPTSSYVDPSVPVPVRIVDPSKDLNSYGLNSVDWKERVESWRVKQDKNMLQVTNKYPEARGDMEGTGSNGEDMQMVDDARLPLSRIVPISSNQLNLYRIVIILRLIILCFFFQYRISHPVRNAYGLWLVSVICEVWFALSWLLDQFPKWYPINRETYLDRLALRYDREGEPSQLAPIDVFVSTVDPLKEPPLITANTVLSILAVDYPVDKVSCYVSDDGSAMLTFESLSETAEFARKWVPFCKKHNIEPRAPEFYFAQKIDYLKDKIQPSFVKERRAMKREYEEFKIRINALVAKAQKVPEEGWTMADGTAWPGNNPRDHPGMIQVFLGHSGGLDTDGNELPRLVYVSREKRPGFQHHKKAGAMNALVGRFVYLLC

SEQ ID NO: 13 - protein, 976 aa, Zea mays
MGRSARFVATLLAFQPLVMSLLPAMSVPSLSAALAMSTSARKGTNAALSARLDTRDRKISGEIPDASPDRHSIRSPTSSYVDPSVPVPVRIVDPSKDLNSYGLNSVDWKERVESWRVKQDKNMLQVTNKYPEARGDMEGTGSNGEDMQMVDDARLPLSRIVPISSNQLNLYRIVIILRLIILCFFFQYRISHPVRNAYGLWLVSVICEVWFALSWLLDQFPKWYPINRETYLDRLALRYDREGEPSQLAPIDVFVSTVDPLKEPPLITANTVLSILAVDYPVDKVSCYVSDDGSAMLTFESLSETAEFARKWVPFCKKHNIEPRAPEFYFAQKIDYLKDKIQPSFVKERRAMKREYEEFKIRINALVAKAQKVPEEGWTMADGTAWPGNNPRDHPGMIQVFLGHSGGLDTDGNELPRLVYVSREKRPGFQHHKKAGAMNALIRVSAVLTNGAYLLNVDCDHYFNSSKALREAMCFMMDPALGRKTCYVQFPQRFDGIDLHDRYANRNIVFFDINMKGLDGIQGPVYVGTGCCFNRQALYGYDPVLTEADLEPNIVVKSCCGRRKRKNKSYMDSQSRIMKRTESSAPIFNMEDIEEGIEGYEDERSVLMSQRKLEKRFGQSPIFIASTFMTQGGIPPSTNPASLLKEAIHVISCGYEDKTEWGKEIGWIYGSVTEDILTGFKMHARGWQSIYCMPPRPCFKGSAPINLSDRLNQVLRWALGSVEILLSRHCPIWYGYNGRLKLLERLAYINTIVYPITSVPLIAYCVLPAICLLTNKFIIPEISNYAGMFFILLFASIFATGILELRWSGVGIEDWWRNEQFWVIGGTSAHLFAVFQGLLKVLAGIDTNFTVTSKASDEDGDFAELYVFKWTSLLIPPTTVLVINLVGMVAGISYAINSGYQSWGPLFGKLFFSIWVILHLYPFLKGLMGRQNRTPTIVIVWSILLASIFSLLWVKIDPFISPTQKAAALGQCGVNC

SEQ ID NO: 14 - protein, 1072 aa, Zea mays
MAANKGMVAGSHNRNEFVMIRHDGDAPVPAKPTKSANGQVCQICGDTVGVSATGDVFVACNECAFPVCRPCYEYERKEGNQCCPQCKTRYKRQKGSPRVHGDDEEEDVDDLDNEFNYKQGNGKGPEWQLQGDDADLSSSARHDPHHRIPRLTSGQQISGEIPDASPDRHSIRSPTSSYVDPSVPVPVRIVDPSKDLNSYGLNSVDWKERVESWRVKQDKNMLQVTNKYPEARGDMEGTGSNGEDMVDDARLPLSRIVPISSNQLNLYRIVIILRLIILCFFFQYRISHPVRNAYGLWLVSVICEVWFALSWLLDQFPKWYPINRETYLDRLALRYDREGEPSQLAPIDVFVSTVDPLKEPPLITANTVLSILAVDYPVDKVSCYVSDDGSAMLTFESLSETAEFARKWVPFCKKHNIEPRAPEFYFAQKIDYLKDKIQPSFVKERRAMKREYEEFKIRINALVAKAQKVPEEGWTMADGTAWPGNNPRDHPGMIQVFLGHSGGLDTDGNELPRLVYVSREKRPGFQHHKKAGAMNALIRVSAVLTNGAYLLNVDCDHYFNSSKALREAMCFMMDPALGRKTCYVQFPQRFDGIDLHDRYANRNIVFFDINMKGLDGIQGPVYVGTGCCFNRQALYGYDPVLTEADLEPNIVVKSCCGRRKRKNKSYMDSQSRIMKRTESSAPIFNMEDIEEGIEGYEDERSVLMSQRKLEKRFGQSPIFIASTFMTQGGIPPSTNPASLLKEAIHVISCGYEDKTEWGKEIGWIYGSVTEDILTGFKMHARGWQSIYCMPPRPCFKGSAPINLSDRLNQVLRWALGSVEILLSRHCPIWYGYNGRLKLLERLAYINTIVYPITSVPLIAYCVLPAICLLTNKFIIPEISNYAGMFFILLFASIFATGILELRWSGVGIEDWWRNEQFWVIGGTSAHLFAVFQGLLKVLAGIDTNFTVTSKASDEDGDFAELYVFKWTSLLIPPTTVLVINLVGMVAGISYAINSGYQSWGPLFGKLFFSIWVILHLYPFLKGLMGRQNRTPTIVIVWSILLASIFSLLWVKIDPFISPTQKAAALGQCGVNC

SEQ ID NO: 15 - protein, 833 aa, Zea mays
MEKICKVDDARLPLSRIVPISSNQLNLYRIVIILRLIILCFFFQYRISHPVRNAYGLWLVSVICEVWFALSWLLDQFPKWYPINRETYLDRLALRYDREGEPSQLAPIDVFVSTVDPLKEPPLITANTVLSILAVDYPVDKVSCYVSDDGSAMLTFESLSETAEFARKWVPFCKKHNIEPRAPEFYFAQKIDYLKDKIQPSFVKERRAMKREYEEFKIRINALVAKAQKVPEEGWTMADGTAWPGNNPRDHPGMIQVFLGHSGGLDTDGNELPRLVYVSREKRPGFQHHKKAGAMNALIRVSAVLTNGAYLLNVDCDHYFNSSKALREAMCFMMDPALGRKTCYVQFPQRFDGIDLHDRYANRNIVFFDINMKGLDGIQGPVYVGTGCCFNRQALYGYDPVLTEADLEPNIVVKSCCGRRKRKNKSYMDSQSRIMKRTESSAPIFNMEDIEEGIEGYEDERSVLMSQRKLEKRFGQSPIFIASTFMTQGGIPPSTNPASLLKEAIHVISCGYEDKTEWGKEIGWIYGSVTEDILTGFKMHARGWQSIYCMPPRPCFKGSAPINLSDRLNQVLRWALGSVEILLSRHCPIWYGYNGRLKLLERLAYINTIVYPITSVPLIAYCVLPAICLLTNKFIIPEISNYAGMFFILLFASIFATGILELRWSGVGIEDWWRNEQFWVIGGTSAHLFAVFQGLLKVLAGIDTNFTVTSKASDEDGDFAELYVFKWTSLLIPPTTVLVINLVGMVAGISYAINSGYQSWGPLFGKLFFSIWVILHLYPFLKGLMGRQNRTPTIVIVWSILLASIFSLLWVKIDPFISPTQKAAALGQCGVNC

SEQ ID NO: 16 - protein, 597 aa, Zea mays
MADGTAWPGNNPRDHPGMIQVFLGHSGGLDTDGNELPRLVYVSREKRPGFQHHKKAGAMNALIRVSAVLTNGAYLLNVDCDHYFNSSKALREAMCFMMDPALGRKTCYVQFPQRFDGIDLHDRYANRNIVFFDINMKGLDGIQGPVYVGTGCCFNRQALYGYDPVLTEADLEPNIVVKSCCGRRKRKNKSYMDSQSRIMKRTESSAPIFNMEDIEEGIEGYEDERSVLMSQRKLEKRFGQSPIFIASTFMTQGGIPPSTNPASLLKEAIHVISCGYEDKTEWGKEIGWIYGSVTEDILTGFKMHARGWQSIYCMPPRPCFKGSAPINLSDRLNQVLRWALGSVEILLSRHCPIWYGYNGRLKLLERLAYINTIVYPITSVPLIAYCVLPAICLLTNKFIIPEISNYAGMFFILLFASIFATGILELRWSGVGIEDWWRNEQFWVIGGTSAHLFAVFQGLLKVLAGIDTNFTVTSKASDEDGDFAELYVFKWTSLLIPPTTVLVINLVGMVAGISYAINSGYQSWGPLFGKLFFSIWVILHLYPFLKGLMGRQNRTPTIVIVWSILLASIFSLLWVKIDPFISPTQKAAALGQCGVNC

SEQ ID NO: 17 - protein, 879 aa, Zea mays
MAANKGMVAGSHNRNEFVMIRHDGDAPVPAKPTKSANGQVCQICGDTVGVSATGDVFVACNECAFPVCRPCYEYERKEGNQCCPQCKTRYKRQKGSPRVHGDDEEEDVDDLDNEFNYKQGNGKGPEWQLQGDDADLSSSARHDPHHRIPRLTSGQQISGEIPDASPDRHSIRSPTSSYVDPSVPVPVRIVDPSKDLNSYGLNSVDWKERVESWRVKQDKNMLQVTNKYPEARGDMEGTGSNGEDMQMVDDARLPLSRIVPISSNQLNLYRIVIILRLIILCFFFQYRISHPVRNAYGLWLVSVICEVWFALSWLLDQFPKWYPINRETYLDRLALRYDREGEPSQLAPIDVFVSTVDPLKEPPLITANTVLSILAVDYPVDKVSCYVSDDGSAMLTFESLSETAEFARKWVPFCKKHNIEPRAPEFYFAQKIDYLKDKIQPSFVKERRAMKREYEEFKIRINALVAKAQKVPEEGWTMADGTAWPGNNPRDHPGMIQVFLGHSGGLDTDGNELPRLVYVSREKRPGFQHHKKAGAMNALIRVSAVLTNGAYLLNVDCDHYFNSSKALREAMCFMMDPALGRKTCYVQFPQRFDGIDLHDRYANRNIVFFDINMKGLDGIQGPVYVGTGCCFNRQALYGYDPVLTEADLEPNIVVKSCCGRRKRKNKSYMDSQSRIMKRTESSAPIFNMEDIEEGIEGYEDERSVLMSQRKLEKRFGQSPIFIASTFMTQGGIPPSTNPASLLKEAIHVISCGYEDKTEWGKEIGWIYGSVTEDILTGFKMHARGWQSIYCMPPRPCFKGSAPINLSDRLNQVLRWALGSVEILLSRHCPIWYGYNGRLKLLERLAYINTIVYPITSVPLIAYCVLPAICLLTNKFIIPE

SEQ ID NO: 18 - protein, 862 aa, Zea mays
MLQVTNKYPEARGDMEGTGSNGEDMQMVDDARLPLSRIVPISSNQLNLYRIVIILRLIILCFFFQYRISHPVRNAYGLWLVSVICEVWFALSWLLDQFPKWYPINRETYLDRLALRYDREGEPSQLAPIDVFVSTVDPLKEPPLITANTVLSILAVDYPVDKVSCYVSDDGSAMLTFESLSETAEFARKWVPFCKKHNIEPRAPEFYFAQKIDYLKDKIQPSFVKERRAMKREYEEFKIRINALVAKAQKVPEEGWTMADGTAWPGNNPRDHPGMIQVFLGHSGGLDTDGNELPRLVYVSREKRPGFQHHKKAGAMNALIRVSAVLTNGAYLLNVDCDHYFNSSKALREAMCFMMDPALGRKTCYVQFPQRFDGIDLHDRYANRNIVFFDINMKGLDGIQGPVYVGTGCCFNRQALYGYDPVLTEADLEPNIVVKSCCGRRKRKNKSYMDSQSRIMKRTESSAPIFNMEDIEEGIEDLSFGIPLGYEDERSVLMSQRKLEKRFGQSPIFIASTFMTQGGIPPSTNPASLLKEAIHVISCGYEDKTEWGKEIGWIYGSVTEDILTGFKMHARGWQSIYCMPPRPCFKGSAPINLSDRLNQVLRWALGSVEILLSRHCPIWYGYNGRLKLLERLAYINTIVYPITSVPLIAYCVLPAICLLTNKFIIPEISNYAGMFFILLFASIFATGILELRWSGVGIEDWWRNEQFWVIGGTSAHLFAVFQGLLKVLAGIDTNFTVTSKASDEDGDFAELYVFKWTSLLIPPTTVLVINLVGMVAGISYAINSGYQSWGPLFGKLFFSIWVILHLYPFLKGLMGRQNRTPTIVIVWSILLASIFSLLWVKIDPFISPTQKAAALGQCGVNC

SEQ ID NO: 19 - protein, 1074 aa, Zea mays; identical to SEQ ID NO: 11

SEQ ID NO: 20 - DNA, 2512 bp, Zea mays
atggggcagtgctacgcgaggaacgtgcacggcgtcgacgcggacgacggtggcatggaggcgaccaccatcatggtctcagcggcaggcgggccggaggatgcggcgtcagtagggggagggcaaggaggcgaagggaggcggagcgcgcggccgtcgccggccgggaagccgcgcgggggcagggccggggcgactccggagcggttgtcgacggcgggtagcccctggacggggagcccactcgacctccccgacggcatcgcgccgtcgcccgcgacctcggtgtccatgccgcgccggttcttccgccgccccttcgcgccgccttccccggccaagcacatcaaggcgtccctcgcgcgccggctcgaccatcgctcgccgccctctgcgtcgcaggttcccaggccgcccgtcgaggtcccgatcccggagcaaggggccagcggcgctggggaggtggagcgggagcttgacaagagcttcggctacgaccgccacttcgccgccaagtacgagctggggaaggaggtgggccgcggccatttcggccacacctgcctcgcgtgcccctgcaagggagacatgagaggccaggtcatggctgtcaaggtcatctccacaggtgttgcaatcataagttcatgatttgcttcttggctgacttgcagggtgatcagtttttttttccgatggtattggcattggcattggcatttccccgcagggttagaagtacattgtagagatcttgtttcagtaatgccgcatttaataatgtgcccattttcatgatctgagtgttcaactgttcatccatctatcacctgtttcttgcttttttgttctttctgtaagctatcatggcatagtagtttatgcagctgtagatcactagcttggcagcgacagagttccttgtgagacctcggagaacctgttcccgtgtatctccatcatattgttgttccttccatgagtttaggtatcccttggtccattctgcatcattttattatatgatcataagtagaagaaacatagggaaaagtgtaggaactaaagaaatgtctcttagattcttggtgccaaagctgaggacatgttgatattggggactgctttccactgacattgttctaattgttgaatgatttaatttggatctcagttttacttggcatctaaaatgtctgtgcagcaagttgtcgagaaaacctagtgtacgataggcgacacagaagaattctacgtgcatgggtgcattgatgttttcatgcatgtatattgtcgttttttgagcgatacaacattaattaattaatgactattttggcctgctataattttcgtttgtgctactgaaattatttgagcaggagatgtatttattgaatctattctgtttcttccttctatatagttctttatttgaattgcgtgcaattttattccttgttacaacatacagacatatatggtatatactttttgaggctagaagctaacagatgctcaagggatcctttcaattaagattaaggtttctcttagacaacccatcagttagcgctaaattcactttcctagcacctagctcactgcaccagggaaaaatatatcttgatctagattttatatttagtttgcaaaattcacctcattcctttgtttttctcttgcagatgacaacggcaatatctattgaggatgtgcgcaaagaggtgaaaattttgaaggcgttatctggacattccaatcttgtcaagttttatgatgcttgtgaggacgcccttaatgtctacataatcatggagtacgttttcttccttgcctttgcataatattgatctatgtaaaaattgtgaatattgcatgtgttgtttatcttgaaatagcatgtatgatagtgctcaaaagtcacattgtctaccttagggttgatgttctcttgcaacacattaacattatatatggaaagacttgctaactgttactatagtccgtctctttctagctagattaatgggaagttacatgataactgatattttccttcacctctattgatcaggctttgtgaaggtggagaactattggatagaatcttgtccaggtattacattttcttgagaaatcattttgcgaacaccactacaaggtgtagctttgttacagtactgtctattttttgcagaggtggaagatacaatgaaggggatgcaaaaattattgttgaacagatattaaaagtagttgccttttgccatcttcagggtgttgttcaccgtgatctgaagccagaggtatgtggactctgttaagtatagtgtatcgcaaaatatgatttgtcgtggcgaaaaaactgtagtatattccttctgataaatccacccttggatgtttttaacagaatttcctattcagcactagggaagatgtaaaaaccattcttattcaacattttacattgttcacacaaataaaggcttctctaactcccccctga

SEQ ID NO: 21 - DNA, 1074 bp, Artificial Sequence
  cDNA of CDPK3
atggggcagtgctacgcgaggaacgtgcacggcgtcgacgcggacgacggtggcatggaggcgaccaccatcatggtctcagcggcaggcgggccggaggatgcggcgtcagtagggggagggcaaggaggcgaagggaggcggagcgcgcggccgtcgccggccgggaagccgcgcgggggcagggccggggcgactccggagcggttgtcgacggcgggtagcccctggacggggagcccactcgacctccccgacggcatcgcgccgtcgcccgcgacctcggtgtccatgccgcgccggttcttccgccgccccttcgcgccgccttccccggccaagcacatcaaggcgtccctcgcgcgccggctcgaccatcgctcgccgccctctgcgtcgcaggttcccaggccgcccgtcgaggtcccgatcccggagcaaggggccagcggcgctggggaggtggagcgggagcttgacaagagcttcggctacgaccgccacttcgccgccaagtacgagctggggaaggaggtgggccgcggccatttcggccacacctgcctcgcgtgcccctgcaagggagacatgagaggccaggtcatggctgtcaaggtcatctccacaggtgttgcaatcataaattttatatttagtttgcaaaattcacctcattcctttgtttttctcttgcagatgacaacggcaatatctattgaggatgtgcgcaaagaggtgaaaattttgaaggcgttatctggacattccaatcttgtcaagttttatgatgcttgtgaggacgcccttaatgtctacataatcatggagctttgtgaaggtggagaactattggatagaatcttgtccagaggtggaagatacaatgaaggggatgcaaaaattattgttgaacagatattaaaagtagttgccttttgccatcttcagggtgttgttcaccgtgatctgaagccagagaatttcctattcagcactagggaagatgtaaaaaccattcttattcaacattttacattgttcacacaaataaaggcttctctaactcccccctga

SEQ ID NO: 22 - protein, 357 aa, Zea mays
MGQCYARNVHGVDADDGGMEATTIMVSAAGGPEDAASVGGGQGGEGRRSARPSPAGKPRGGRAGATPERLSTAGSPWTGSPLDLPDGIAPSPATSVSMPRRFFRRPFAPPSPAKHIKASLARRLDHRSPPSASQVPRPPVEVPIPEQGASGAGEVERELDKSFGYDRHFAAKYELGKEVGRGHFGHTCLACPCKGDMRGQVMAVKVISTGVAIINFIFSLQNSPHSFVFLLQMTTAISIEDVRKEVKILKALSGHSNLVKFYDACEDALNVYIIMELCEGGELLDRILSRGGRYNEGDAKIIVEQILKVVAFCHLQGVVHRDLKPENFLFSTREDVKTILIQHFTLFTQIKASLTPP

SEQ ID NO: 23 - DNA, 9312 bp, Zea mays
gcaaaaactaagtctaaacttgattttttttcataaaaaaacaggctaaacttaaaaaaatttgggcagcccgtcggatgagattccgcactcgcaacctacattcgcgtcgacgcgtcgtctccacgccgactgaaatgccgccgccactccttcctgtcatgtaccttgtgtcgcctctcccccgccaactaatcatctcctgtagcagcagccggcagcaggtggcggccgccggccatggagctggcggtgggcgcgtcggaggcaaccctcaagtcactgctgagcaagctcggcgccctcctcgcagaggagtatgccctgatccgtggcgtccggggcgacatccaattcatcaccgacgagctagccagcatgcaggccttcctcagcaacctgagcaagtacgaggagggccacgacgaccagacggaggactggatgaagcagatccgggacgtcgcctacgacatcgaagactgcatcgacgacttcgcccacagcctccgtccagaccccaggggcagcggctgggtgacggccgtccgcaagattctctacgagatccggacgtggtacccccgccgcaacatcgccacccagatcgtcgatctgaagaaccgcgcgcagcatatcggcgagcgccgaaccaggtacggcgtccgcgacccgcagcctgggaagaagaagagcaacttggggggcgctacggggtatctcgctgctgagaatcaggacgtgacccggcaactcgtccgcgcccagcagcctgtgggggtgaaggatatgccggatcttaagaagtggatccatgaagatggcaagagggagaaaaccggcgtgctgagcattgtcgggtttggtggtgtgggtaaaaccaccatcgcaatggatctctacacaaaatacgggcctgaattccagcgtcgagcaatggtcactgtgtcccagaactcagatcctgaggcggtcgtcagaaatatactgaaccaggtcaaaccactgtccaacaacgcggagaggcgaggcgaagatagctctggcgccgtctccttggggaagaagaatccagtcattgcaactatattaagccgaattaggctgccgttcccaaatcaaaagcaagataatggtggcggtcgtgacaagcatgaacaaataaaaaaggagttgaagaattgcctcgcagatacaaggtatacctctatctctactactataaaacaccacttttcctggtttctaccttggtcccttttcaaaaagtcatcacaattatttttaatttaaactacggtctaaacatcaactttaacgtccacgcccaccggtttgcacgtttatgcaaaactaaggtaaaattgtgcataagtcagagttcgaacttggttgttgtctccaacagaacacacatttttgtgcttttttaaaacaaatacatatggcatatagaaaccatagtgatgcacgggcatttgactagttaattaatatatacaacccttttctctccctgtaccacttttaaactgttctatatattaatatattattatcgtctacatttggtgctttatagaagggcgggcctggtgcagcggtagagcctaccgtctgtaaccggaaggttccgggttcgagcctcagcctctgcatattatgcgggtaagacttgacgcttaaagatacccttccccacagaccccgtatagtgcgggaagcctacgacactgggtacgccctttttacatttggtgctttatatggaaatatttagaacctatttattaccacgcctattattctattgctctaactagagcatttgatatacgagcaagcaagatccattgtagatttcaatatagcactaatggatacattgtatttttaggaaaaaagtttggtacaagtttcatatttttcggataaaaaatgaatttgacatgatttttagaaattaaacattattatattatctctataaaataaatataaaaccaacacttaaaccaagtttgagggtgtactttgtctggtttttatagtttgagggacctagatacctaacttcatagttcaaggttgaaaatcgaatgccagtttgtaaaatggactttgctctttattcttcacctctgaatatccacattgccaatgtcttctgtcttcatcgcagagagcagtcaattgattccaaagacatgtcttctacttcactttcttttccttttcctagtaaggtttttagttagcttcaacaagttttgtcccgatatatattgttcagccttgatacattaattttggtatctatgccctgaacttctaatgtcttgtttatttccctagttagtagcttgggtaggtttatgatccagcgcagaggcggatctacgatccagacgttcggtattcaaaatcacattaggtgctcaaaattttgaagaataaagaaaattttcccttgtcaaaaatgtacgtatagtgtatggaaattgtttttgtgtgaatcatgggtatttgacataatgcccattatccttctgtgcctgcccctgatccagcgtatgatggcaacgatgagtaaatagttctaacttttatgaatcatgggtataaagaaacttttatgaaaagttctatgtgtagtcttgactttccccacacataattgggttctcaagactgacctcaccaaactttctatcccacattttctatttcgaactccactgtgcctacagtgcgtgaacagtttcgtgcaagtccatatacatggacctcgcaggacttgcaaaccccacacgtagaacaatggtatgcacaagtattgataccatcggtgtgtgcaaatgttatacaaaccttgtcacaaccaaaagcaatgtactaagtagtataatcaagcgcttgcaagcactaagccatactatatatgcacctaaacactttattggctagagcttcacaggaatgaatctctatccaagagtatattctagtaactcttaactacactaaaacgagcaccaaccatcaaactaactgttgctccaatttgactatttatgtgttcgatgtacaactagactgtcaggtgcgtgcaatcgattcagtgtcatcatcaaactcaatatctcctcaggtcatttaatcttgtgaatcgttagaccatccaatgcattatgcatttcctttaccaagctcttctaatcactggacctttcaatgttcactaacattcttataatcggaccatctagtgctaagagttgtgcatcattgcttggtcttcatttttcattactttcctcaccaatttgttcggtgcatgtttctccattgtctaggccatcaacttcttgaaaattctgaactgtggtttattcagtgtgatgtcttaggtcttctagttggtattctaggtcttctcttgtactctcgatcactcctttgaggtgtttgtttaccaagtccattactttcatcattggaactaaatgaaatattttagcaagctatattagtcacaatggttatgttgtcactcaaataccaaaatctcatacaagttgtttttgatagtaaaggctataggggaaacccccacaacagtaaaatatattaaaataattataaaaaaggtgggacaagactatacaataagaagaacaaaacaaaaaacagagaatgaataaggaataaaaaacaacaactactaagatttagcgaggtcagagagaagttagccagagaggcacaagcaatttaaggtctgggctaaatttgagcatctgaagcttcagcgtatcattgaagcaagtcttctaggagttgaaagacaagacatattccctgaaaatagctgcattccgttgcttccagatttcccaagcagagtctaccagaacttccatgaagaagggattgtgaattgattccttgtattagccaccatgtgaaagaagtctagagcatggtcccattggatacccacaaagttccagcactcaacactgaagggacactcaaagagcaagcaataagtagtctcttcacaattcagattgcaaagagtgcaactgtgatcattatttgtcaatgcataaccttttctccttagaagattctttgagttgattctgcctctgaataccagccaaatgaaaactttaagctttttggccacttttgacttccagatccaggtaaaaggaggaggtggctgtatacattgaaaattcaaattgtagactctggtggaacagaaattgttatttccccaggagtaagtccacctgtcttgtccactcatgtcactctgaatcaaggcagcaaagttgctcaactccacatatgcctcatgaacttcaggagataatggggaatgaaaattttcctcgagagttggattcccaagatactccataagagagcaatccttctttttagcaaacgagtataagcaagggtaaacctgtttgggcaaagagttgttctaaacatcttgccagagaagtatggtcttactcttaccatcatcagcttcgggcatagcaacccccctaaaatgatcaatcagtctagagatgtctttccaccaaaaggaacctttttcgggagagcaatggggaattctacccgatcttttgtgcatgttccttataagattcacccaaggtgtgtcatgcctaccatagaacttatgcagaaatttcatcagaagggccctgttttgaattttaagattgtgcactcccagatctcctttgctcttaggagaggtaactttgtcccagacaataaggggagttgatttcacattaacatcacttcctttctagagacagtttcttgcacgatcaatagagttgatatccgaggatgggagcttctgaggcacattgcataaatcggcattgcccagaaagtggagttgaccaatgtcagcctcccagccatcgatagccacatgctggtcatgttcaaccttctttcaatcttgttgttgacagggagataatcttgaactttaggcctagaggtcccaattggcaaaccaagataagtaaggggaaggaaccaatttgacaactaaacacagcagccaactgagtgcctttaatagcgtccaagttgataggaaggaggcactacttgctgtaaataactttaggacctgtcaatcctgagaaggaatgaagaatcccctttaggcaaaataactctcgttgagatgctttcataatgatcaaggtaccatcagcataattatggggaactctgactggctgtgggtcataacaggaactgataaggtaccaatacatgctgctttgttaataatgtattgaagaagcttagcagccaaaacaaagagcaaaggggacaaagggtctccctggtgcacccctcttctacattgaaatttttgccagggacaccatttaacaaaacagccgaagtgcctgagcaaagaactgagtgaacccactaattccattttcaggcaacccaagtgaaaagaacacaaacgcctaagagggggggggggagtgaattaggacttctaaaaatctcgttagtctaggccacaaataaatctcctaaacaaaaccaatgcaaataactaaacaagaatgtgcaatctaggttttatctaactgttgctatctctatcgcaaaagagttatgcaatctaagttctaatcctatattctactgagaatggtaagattgcaacttaagtaatcaatgtaactgtagaagctaaagagcagaggtagagattgcaaactcccgtggacgcatcgatattttaccgaggtatctaggaccgtgcaaggttctgactaatcctcgttggtgaccctacgcaaagggaagatcatgtgagggctaagcatcgggacaggtaactccgtagagagccgcagtgataggattataactcctaccagagagactgcacagattgtagggatgaggcgttgcgggttggcgcaggggcgccgtgaccgggcgcttggcggactggcgcagggggcgctgtggccacgctgttcttcggcggacgctggacgacgactttgggagaggaaaactcgactgcttcctttggaggaagtaagctaaatagttttctgcttaattcatatagacttatactcccttctagtccttatctaaagagatcaaatctgagatcccctcttctctaacaaaccttatctaactaatctgcatgaaatcccctcttttctctctaacaaaccttatctccttaatcttctaatccttatctaactaatctgcatgcctatttttggccgccgctctgctgttgtccgatgcctgtagtggcggccggtcataacactccccgcctgcgccctggctgtctgctgcttcatgtgcctttcatttttgtttccatacatgatactagtagaatgcgttaataagccaaataccagtattcatgtatattgccaccacatagtgccggcctctagtcaagcatgccctctcccaaaacatctcccgaatccaaagcccactcaacatttgtgagactgctatgtggaaatatatggtaatccactaatcctgatgtgtgtttgtttcgtattccttgacaggtacttactgttaattgatgatgtatggtcatcatcaacatggcaaagtatttggaaatattttcctgaagaaaataagaagggaagcagaataattgtcaccacacggtttcaagctgttgccacgacatgctctgcacataaagatcaagatcatattcatttggttgatgttctttccggtgaagaggccaacagtttattcatcaaaaccttgtccgagtgtagaggtaatagtgccagacaatcaaaccagaccaaggtgccagacagagtttggcagatgtgtggtggcttgccgttggccatagttaccatggcaggtgtggtggcatccaagccactgatgatcagagatgaatggattgccgtttgcaattccttgtttccggagccagaaaaatgtcataaaccagaggaatttatgaggataataaactattgctacaacgacttgcctagtgatctcaagacttgctgtctgtatcttagcatatttcctaagggccgtgaagttagcaggaagcggctgattcggaggtggatagcggaaggtttcgtcagtgagaagcaaggtttgagtgtggaggatgttgctgacacatgcttcaaacagctcattgaaaggaagatgatgaggcccgttgagcacaacagcaatggaagcgtcaaaagttgtcgggtccatgacatggtacttgagtacatcatttccaaggcagcagaggagaatttcatcactgtggtcggtagccactggtccatgtcaacaagtagcaagaaagttcgtaggctcactatccatggcagtgaccccaaacgtgcaaagaatgttgacagtatgaacttgtcacatgtccgatcactgactgtgttcgagaacctggacaaactgcacttcaaatcatttaaaactggaatagtgcaagtgttagatctcgaaggctgcaaaggtttcagggagagcgatgccaacgtttcagacatatgcgaaatgattctacttaagtatctgagcctacggaaaacagacataaaaaatcttcccaataatatttccaagctcaagtacctagagactctcgatgttagggagacagaagttaaacagctgcctacgactgtagggcagttggaacggataactaacatccttggtggtgataagagaagacagagaaccctgaaacttcctaaggagctcaagggaacaatgaaatctttacgcatattgtcgggggttgagattgtggagggatcaacagctgcatcagacttcagttacttcactactctgaggaagctggcaatttacaggatccaccacaatgaagatatattcaaaaatttgctgtcctcgatccagtacctcagtggttattcactccaaactcttttaatcgttgatgagtcatctgaattcttcaagaccctggagtcaatgtcgccatcccatctaactgacctgagagctctggagctgtctggcaaattgctttaccttccaaagtggctcgacactcttcaacatcttgtgaagttaacgctttcagcaacagccctatgcactgataactttttggtcatcagaaaactgaactcgttgttttccctcaccttttcaatcagcgaaaagcaagaccctgctttggcagccattcttgagaaaaataagtcagcttcaagaggagaaatcgttgtgccagctggaggcttcagtaagctcaagctgcttcggatatttgttcctcttcttccatcccttaccttctcaaagaatgctacaccacatctggaaaggattgaactgcgttttaaaaagctggaaggatttcatggtgtggatgaacttggaaagctccaagatgtggtcttaacagttgacgggcatgcaagtgagaggacaaattcgatactagacggattgaagcagaggctagaaggaaagtgcaacctcattgtcaacaagtatcacgactgattgaaatggatgtaaacatatttctttgagtagaaagatcaccagctcattaggtaaataagctttgtggctgtacacaaacctaggtgtttgacatctggattcctttcgtgttatcttcatttattgttggctttatgtcggttcggttttgtaacatgtcagacaagagtgaattttttttagaccaaaggccaaactttagcaccatcttttgttgagtacatgttctatatgctcccgggcatctgttgtggattttttatatatataaatgccaccgttttgaatattgacggctagcagctatcgccactctcattttgcagatttgcagtaaagggtcggagacacggagacggctgcatccctagactcccataggccgacccaccgcaaatcccacagcctcttatgcttcatggttctcggccatttcaggttcggttatttcgaatccacatccatgtggattgagggatcgagacggattttgacttgttatggatttaaaccgactcaatcccacttaatccacatcaattaagagcgaaccgaacaagctgtcatggttctcggccatagctgtagcgagcatgtataacggaacaactttcttatatgatgtaagtgcattcttagtaataattaagtaaacaacgttctcatataagtttggatgag

SEQ ID NO: 24 - DNA, 2946 bp, Artificial Sequence
  cDNA of transcript 1 derived from genomic DNA of Rpp13
atggagctggcggtgggcgcgtcggaggcaaccctcaagtcactgctgagcaagctcggcgccctcctcgcagaggagtatgccctgatccgtggcgtccggggcgacatccaattcatcaccgacgagctagccagcatgcaggccttcctcagcaacctgagcaagtacgaggagggccacgacgaccagacggaggactggatgaagcagatccgggacgtcgcctacgacatcgaagactgcatcgacgacttcgcccacagcctccgtccagaccccaggggcagcggctgggtgacggccgtccgcaagattctctacgagatccggacgtggtacccccgccgcaacatcgccacccagatcgtcgatctgaagaaccgcgcgcagcatatcggcgagcgccgaaccaggtacggcgtccgcgacccgcagcctgggaagaagaagagcaacttggggggcgctacggggtatctcgctgctgagaatcaggacgtgacccggcaactcgtccgcgcccagcagcctgtgggggtgaaggatatgccggatcttaagaagtggatccatgaagatggcaagagggagaaaaccggcgtgctgagcattgtcgggtttggtggtgtgggtaaaaccaccatcgcaatggatctctacacaaaatacgggcctgaattccagcgtcgagcaatggtcactgtgtcccagaactcagatcctgaggcggtcgtcagaaatatactgaaccaggtcaaaccactgtccaacaacgcggagaggcgaggcgaagatagctctggcgccgtctccttggggaagaagaatccagtcattgcaactatattaagccgaattaggctgccgttcccaaatcaaaagcaagataatggtggcggtcgtgacaagcatgaacaaataaaaaaggagttgaagaattgcctcgcagatacaagatccaggtacttactgttaattgatgatgtatggtcatcatcaacatggcaaagtatttggaaatattttcctgaagaaaataagaagggaagcagaataattgtcaccacacggtttcaagctgttgccacgacatgctctgcacataaagatcaagatcatattcatttggttgatgttctttccggtgaagaggccaacagtttattcatcaaaaccttgtccgagtgtagaggtaatagtgccagacaatcaaaccagaccaaggtgccagacagagtttggcagatgtgtggtggcttgccgttggccatagttaccatggcaggtgtggtggcatccaagccactgatgatcagagatgaatggattgccgtttgcaattccttgtttccggagccagaaaaatgtcataaaccagaggaatttatgaggataataaactattgctacaacgacttgcctagtgatctcaagacttgctgtctgtatcttagcatatttcctaagggccgtgaagttagcaggaagcggctgattcggaggtggatagcggaaggtttcgtcagtgagaagcaaggtttgagtgtggaggatgttgctgacacatgcttcaaacagctcattgaaaggaagatgatgaggcccgttgagcacaacagcaatggaagcgtcaaaagttgtcgggtccatgacatggtacttgagtacatcatttccaaggcagcagaggagaatttcatcactgtggtcggtagccactggtccatgtcaacaagtagcaagaaagttcgtaggctcactatccatggcagtgaccccaaacgtgcaaagaatgttgacagtatgaacttgtcacatgtccgatcactgactgtgttcgagaacctggacaaactgcacttcaaatcatttaaaactggaatagtgcaagtgttagatctcgaaggctgcaaaggtttcagggagagcgatgccaacgtttcagacatatgcgaaatgattctacttaagtatctgagcctacggaaaacagacataaaaaatcttcccaataatatttccaagctcaagtacctagagactctcgatgttagggagacagaagttaaacagctgcctacgactgtagggcagttggaacggataactaacatccttggtggtgataagagaagacagagaaccctgaaacttcctaaggagctcaagggaacaatgaaatctttacgcatattgtcgggggttgagattgtggagggatcaacagctgcatcagacttcagttacttcactactctgaggaagctggcaatttacaggatccaccacaatgaagatatattcaaaaatttgctgtcctcgatccagtacctcagtggttattcactccaaactcttttaatcgttgatgagtcatctgaattcttcaagaccctggagtcaatgtcgccatcccatctaactgacctgagagctctggagctgtctggcaaattgctttaccttccaaagtggctcgacactcttcaacatcttgtgaagttaacgctttcagcaacagccctatgcactgataactttttggtcatcagaaaactgaactcgttgttttccctcaccttttcaatcagcgaaaagcaagaccctgctttggcagccattcttgagaaaaataagtcagcttcaagaggagaaatcgttgtgccagctggaggcttcagtaagctcaagctgcttcggatatttgttcctcttcttccatcccttaccttctcaaagaatgctacaccacatctggaaaggattgaactgcgttttaaaaagctggaaggatttcatggtgtggatgaacttggaaagctccaagatgtggtcttaacagttgacgggcatgcaagtgagaggacaaattcgatactagacggattgaagcagaggctagaaggaaagtgcaacctcattgtcaacaagtatcacgactga

SEQ ID NO: 25 - DNA, 1698 bp, Artificial Sequence
  cDNA of transcript 2 derived from genomic DNA of Rpp13
atgtgtggtggcttgccgttggccatagttaccatggcaggtgtggtggcatccaagccactgatgatcagagatgaatggattgccgtttgcaattccttgtttccggagccagaaaaatgtcataaaccagaggaatttatgaggataataaactattgctacaacgacttgcctagtgatctcaagacttgctgtctgtatcttagcatatttcctaagggccgtgaagttagcaggaagcggctgattcggaggtggatagcggaaggtttcgtcagtgagaagcaaggtttgagtgtggaggatgttgctgacacatgcttcaaacagctcattgaaaggaagatgatgaggcccgttgagcacaacagcaatggaagcgtcaaaagttgtcgggtccatgacatggtacttgagtacatcatttccaaggcagcagaggagaatttcatcactgtggtcggtagccactggtccatgtcaacaagtagcaagaaagttcgtaggctcactatccatggcagtgaccccaaacgtgcaaagaatgttgacagtatgaacttgtcacatgtccgatcactgactgtgttcgagaacctggacaaactgcacttcaaatcatttaaaactggaatagtgcaagtgttagatctcgaaggctgcaaaggtttcagggagagcgatgccaacgtttcagacatatgcgaaatgattctacttaagtatctgagcctacggaaaacagacataaaaaatcttcccaataatatttccaagctcaagtacctagagactctcgatgttagggagacagaagttaaacagctgcctacgactgtagggcagttggaacggataactaacatccttggtggtgataagagaagacagagaaccctgaaacttcctaaggagctcaagggaacaatgaaatctttacgcatattgtcgggggttgagattgtggagggatcaacagctgcatcagacttcagttacttcactactctgaggaagctggcaatttacaggatccaccacaatgaagatatattcaaaaatttgctgtcctcgatccagtacctcagtggttattcactccaaactcttttaatcgttgatgagtcatctgaattcttcaagaccctggagtcaatgtcgccatcccatctaactgacctgagagctctggagctgtctggcaaattgctttaccttccaaagtggctcgacactcttcaacatcttgtgaagttaacgctttcagcaacagccctatgcactgataactttttggtcatcagaaaactgaactcgttgttttccctcaccttttcaatcagcgaaaagcaagaccctgctttggcagccattcttgagaaaaataagtcagcttcaagaggagaaatcgttgtgccagctggaggcttcagtaagctcaagctgcttcggatatttgttcctcttcttccatcccttaccttctcaaagaatgctacaccacatctggaaaggattgaactgcgttttaaaaagctggaaggatttcatggtgtggatgaacttggaaagctccaagatgtggtcttaacagttgacgggcatgcaagtgagaggacaaattcgatactagacggattgaagcagaggctagaaggaaagtgcaacctcattgtcaacaagtatcacgactga

SEQ ID NO: 26 - DNA, 2946 bp, Artificial Sequence; identical to SEQ ID NO: 24
  cDNA of transcript 3 derived from genomic DNA of Rpp13

SEQ ID NO: 27 - DNA, 1698 bp, Artificial Sequence; identical to SEQ ID NO: 25
  cDNA of transcript 4 derived from genomic DNA of Rpp13

SEQ ID NO: 28 - DNA, 1698 bp, Artificial Sequence; identical to SEQ ID NO: 25
  cDNA of transcript 5 derived from genomic DNA of Rpp13

SEQ ID NO: 29 - DNA, 1698 bp, Artificial Sequence; identical to SEQ ID NO: 25
  cDNA of transcript 6 derived from genomic DNA of Rpp13

SEQ ID NO: 30 - DNA, 1698 bp, Artificial Sequence; identical to SEQ ID NO: 25
  cDNA of transcript 10 derived from genomic DNA of Rpp13

SEQ ID NO: 31 - DNA, 2940 bp, Artificial Sequence
  cDNA of transcript 11 derived from genomic DNA of Rpp13
atggagctggcggtgggcgcgtcggaggcaaccctcaagtcactgctgagcaagctcggcgccctcctcgcagaggagtatgccctgatccgtggcgtccggggcgacatccaattcatcaccgacgagctagccagcatgcaggccttcctcagcaacctgagcaagtacgaggagggccacgacgaccagacggaggactggatgaagcagatccgggacgtcgcctacgacatcgaagactgcatcgacgacttcgcccacagcctccgtccagaccccaggggcagcggctgggtgacggccgtccgcaagattctctacgagatccggacgtggtacccccgccgcaacatcgccacccagatcgtcgatctgaagaaccgcgcgcagcatatcggcgagcgccgaaccaggtacggcgtccgcgacccgcagcctgggaagaagaagagcaacttggggggcgctacggggtatctcgctgctgagaatcaggacgtgacccggcaactcgtccgcgcccagcagcctgtgggggtgaaggatatgccggatcttaagaagtggatccatgaagatggcaagagggagaaaaccggcgtgctgagcattgtcgggtttggtggtgtgggtaaaaccaccatcgcaatggatctctacacaaaatacgggcctgaattccagcgtcgagcaatggtcactgtgtcccagaactcagatcctgaggcggtcgtcagaaatatactgaaccaggtcaaaccactgtccaacaacgcggagaggcgaggcgaagatagctctggcgccgtctccttggggaagaagaatccagtcattgcaactatattaagccgaattaggctgccgttcccaaatcaaaagcaagataatggtggcggtcgtgacaagcatgaacaaataaaaaaggagttgaagaattgcctcgcagatacaaggtacttactgttaattgatgatgtatggtcatcatcaacatggcaaagtatttggaaatattttcctgaagaaaataagaagggaagcagaataattgtcaccacacggtttcaagctgttgccacgacatgctctgcacataaagatcaagatcatattcatttggttgatgttctttccggtgaagaggccaacagtttattcatcaaaaccttgtccgagtgtagaggtaatagtgccagacaatcaaaccagaccaaggtgccagacagagtttggcagatgtgtggtggcttgccgttggccatagttaccatggcaggtgtggtggcatccaagccactgatgatcagagatgaatggattgccgtttgcaattccttgtttccggagccagaaaaatgtcataaaccagaggaatttatgaggataataaactattgctacaacgacttgcctagtgatctcaagacttgctgtctgtatcttagcatatttcctaagggccgtgaagttagcaggaagcggctgattcggaggtggatagcggaaggtttcgtcagtgagaagcaaggtttgagtgtggaggatgttgctgacacatgcttcaaacagctcattgaaaggaagatgatgaggcccgttgagcacaacagcaatggaagcgtcaaaagttgtcgggtccatgacatggtacttgagtacatcatttccaaggcagcagaggagaatttcatcactgtggtcggtagccactggtccatgtcaacaagtagcaagaaagttcgtaggctcactatccatggcagtgaccccaaacgtgcaaagaatgttgacagtatgaacttgtcacatgtccgatcactgactgtgttcgagaacctggacaaactgcacttcaaatcatttaaaactggaatagtgcaagtgttagatctcgaaggctgcaaaggtttcagggagagcgatgccaacgtttcagacatatgcgaaatgattctacttaagtatctgagcctacggaaaacagacataaaaaatcttcccaataatatttccaagctcaagtacctagagactctcgatgttagggagacagaagttaaacagctgcctacgactgtagggcagttggaacggataactaacatccttggtggtgataagagaagacagagaaccctgaaacttcctaaggagctcaagggaacaatgaaatctttacgcatattgtcgggggttgagattgtggagggatcaacagctgcatcagacttcagttacttcactactctgaggaagctggcaatttacaggatccaccacaatgaagatatattcaaaaatttgctgtcctcgatccagtacctcagtggttattcactccaaactcttttaatcgttgatgagtcatctgaattcttcaagaccctggagtcaatgtcgccatcccatctaactgacctgagagctctggagctgtctggcaaattgctttaccttccaaagtggctcgacactcttcaacatcttgtgaagttaacgctttcagcaacagccctatgcactgataactttttggtcatcagaaaactgaactcgttgttttccctcaccttttcaatcagcgaaaagcaagaccctgctttggcagccattcttgagaaaaataagtcagcttcaagaggagaaatcgttgtgccagctggaggcttcagtaagctcaagctgcttcggatatttgttcctcttcttccatcccttaccttctcaaagaatgctacaccacatctggaaaggattgaactgcgttttaaaaagctggaaggatttcatggtgtggatgaacttggaaagctccaagatgtggtcttaacagttgacgggcatgcaagtgagaggacaaattcgatactagacggattgaagcagaggctagaaggaaagtgcaacctcattgtcaacaagtatcacgactga

SEQ ID NO: 32 - DNA, 2940 bp, Artificial Sequence; identical to SEQ ID NO: 31
  cDNA of transcript 12 derived from genomic DNA of Rpp13

SEQ ID NO: 33 - DNA, 2130 bp, Artificial Sequence
  cDNA of transcript 13 derived from genomic DNA of Rpp13
atggatctctacacaaaatacgggcctgaattccagcgtcgagcaatggtcactgtgtcccagaactcagatcctgaggcggtcgtcagaaatatactgaaccaggtcaaaccactgtccaacaacgcggagaggcgaggcgaagatagctctggcgccgtctccttggggaagaagaatccagtcattgcaactatattaagccgaattaggctgccgttcccaaatcaaaagcaagataatggtggcggtcgtgacaagcatgaacaaataaaaaaggagttgaagaattgcctcgcagatacaaggtacttactgttaattgatgatgtatggtcatcatcaacatggcaaagtatttggaaatattttcctgaagaaaataagaagggaagcagaataattgtcaccacacggtttcaagctgttgccacgacatgctctgcacataaagatcaagatcatattcatttggttgatgttctttccggtgaagaggccaacagtttattcatcaaaaccttgtccgagtgtagaggtaatagtgccagacaatcaaaccagaaggaatttatgaggataataaactattgctacaacgacttgcctagtgatctcaagacttgctgtctgtatcttagcatatttcctaagggccgtgaagttagcaggaagcggctgattcggaggtggatagcggaaggtttcgtcagtgagaagcaaggtttgagtgtggaggatgttgctgacacatgcttcaaacagctcattgaaaggaagatgatgaggcccgttgagcacaacagcaatggaagcgtcaaaagttgtcgggtccatgacatggtacttgagtacatcatttccaaggcagcagaggagaatttcatcactgtggtcggtagccactggtccatgtcaacaagtagcaagaaagttcgtaggctcactatccatggcagtgaccccaaacgtgcaaagaatgttgacagtatgaacttgtcacatgtccgatcactgactgtgttcgagaacctggacaaactgcacttcaaatcatttaaaactggaatagtgcaagtgttagatctcgaaggctgcaaaggtttcagggagagcgatgccaacgtttcagacatatgcgaaatgattctacttaagtatctgagcctacggaaaacagacataaaaaatcttcccaataatatttccaagctcaagtacctagagactctcgatgttagggagacagaagttaaacagctgcctacgactgtagggcagttggaacggataactaacatccttggtggtgataagagaagacagagaaccctgaaacttcctaaggagctcaagggaacaatgaaatctttacgcatattgtcgggggttgagattgtggagggatcaacagctgcatcagacttcagttacttcactactctgaggaagctggcaatttacaggatccaccacaatgaagatatattcaaaaatttgctgtcctcgatccagtacctcagtggttattcactccaaactcttttaatcgttgatgagtcatctgaattcttcaagaccctggagtcaatgtcgccatcccatctaactgacctgagagctctggagctgtctggcaaattgctttaccttccaaagtggctcgacactcttcaacatcttgtgaagttaacgctttcagcaacagccctatgcactgataactttttggtcatcagaaaactgaactcgttgttttccctcaccttttcaatcagcgaaaagcaagaccctgctttggcagccattcttgagaaaaataagtcagcttcaagaggagaaatcgttgtgccagctggaggcttcagtaagctcaagctgcttcggatatttgttcctcttcttccatcccttaccttctcaaagaatgctacaccacatctggaaaggattgaactgcgttttaaaaagctggaaggatttcatggtgtggatgaacttggaaagctccaagatgtggtcttaacagttgacgggcatgcaagtgagaggacaaattcgatactagacggattgaagcagaggctagaaggaaagtgcaacctcattgtcaacaagtatcacgactga

SEQ ID NO: 34 - protein, 981 aa, Zea mays
MELAVGASEATLKSLLSKLGALLAEEYALIRGVRGDIQFITDELASMQAFLSNLSKYEEGHDDQTEDWMKQIRDVAYDIEDCIDDFAHSLRPDPRGSGWVTAVRKILYEIRTWYPRRNIATQIVDLKNRAQHIGERRTRYGVRDPQPGKKKSNLGGATGYLAAENQDVTRQLVRAQQPVGVKDMPDLKKWIHEDGKREKTGVLSIVGFGGVGKTTIAMDLYTKYGPEFQRRAMVTVSQNSDPEAVVRNILNQVKPLSNNAERRGEDSSGAVSLGKKNPVIATILSRIRLPFPNQKQDNGGGRDKHEQIKKELKNCLADTRSRYLLLIDDVWSSSTWQSIWKYFPEENKKGSRIIVTTRFQAVATTCSAHKDQDHIHLVDVLSGEEANSLFIKTLSECRGNSARQSNQTKVPDRVWQMCGGLPLAIVTMAGVVASKPLMIRDEWIAVCNSLFPEPEKCHKPEEFMRIINYCYNDLPSDLKTCCLYLSIFPKGREVSRKRLIRRWIAEGFVSEKQGLSVEDVADTCFKQLIERKMMRPVEHNSNGSVKSCRVHDMVLEYIISKAAEENFITVVGSHWSMSTSSKKVRRLTIHGSDPKRAKNVDSMNLSHVRSLTVFENLDKLHFKSFKTGIVQVLDLEGCKGFRESDANVSDICEMILLKYLSLRKTDIKNLPNNISKLKYLETLDVRETEVKQLPTTVGQLERITNILGGDKRRQRTLKLPKELKGTMKSLRILSGVEIVEGSTAASDFSYFTTLRKLAIYRIHHNEDIFKNLLSSIQYLSGYSLQTLLIVDESSEFFKTLESMSPSHLTDLRALELSGKLLYLPKWLDTLQHLVKLTLSATALCTDNFLVIRKLNSLFSLTFSISEKQDPALAAILEKNKSASRGEIVVPAGGFSKLKLLRIFVPLLPSLTFSKNATPHLERIELRFKKLEGFHGVDELGKLQDVVLTVDGHASERTNSILDGLKQRLEGKCNLIVNKYHD

SEQ ID NO: 35 - protein, 565 aa, Zea mays
MCGGLPLAIVTMAGVVASKPLMIRDEWIAVCNSLFPEPEKCHKPEEFMRIINYCYNDLPSDLKTCCLYLSIFPKGREVSRKRLIRRWIAEGFVSEKQGLSVEDVADTCFKQLIERKMMRPVEHNSNGSVKSCRVHDMVLEYIISKAAEENFITVVGSHWSMSTSSKKVRRLTIHGSDPKRAKNVDSMNLSHVRSLTVFENLDKLHFKSFKTGIVQVLDLEGCKGFRESDANVSDICEMILLKYLSLRKTDIKNLPNNISKLKYLETLDVRETEVKQLPTTVGQLERITNILGGDKRRQRTLKLPKELKGTMKSLRILSGVEIVEGSTAASDFSYFTTLRKLAIYRIHHNEDIFKNLLSSIQYLSGYSLQTLLIVDESSEFFKTLESMSPSHLTDLRALELSGKLLYLPKWLDTLQHLVKLTLSATALCTDNFLVIRKLNSLFSLTFSISEKQDPALAAILEKNKSASRGEIVVPAGGFSKLKLLRIFVPLLPSLTFSKNATPHLERIELRFKKLEGFHGVDELGKLQDVVLTVDGHASERTNSILDGLKQRLEGKCNLIVNKYHD

SEQ ID NO: 36 - protein, 981 aa, Zea mays; identical to SEQ ID NO: 34

SEQ ID NO: 37 - protein, 565 aa, Zea mays; identical to SEQ ID NO: 35

SEQ ID NO: 38 - protein, 565 aa, Zea mays; identical to SEQ ID NO: 35

SEQ ID NO: 39 - protein, 565 aa, Zea mays; identical to SEQ ID NO: 35

SEQ ID NO: 40 - protein, 565 aa, Zea mays; identical to SEQ ID NO: 35

SEQ ID NO: 41 - protein, 979 aa, Zea mays
MELAVGASEATLKSLLSKLGALLAEEYALIRGVRGDIQFITDELASMQAFLSNLSKYEEGHDDQTEDWMKQIRDVAYDIEDCIDDFAHSLRPDPRGSGWVTAVRKILYEIRTWYPRRNIATQIVDLKNRAQHIGERRTRYGVRDPQPGKKKSNLGGATGYLAAENQDVTRQLVRAQQPVGVKDMPDLKKWIHEDGKREKTGVLSIVGFGGVGKTTIAMDLYTKYGPEFQRRAMVTVSQNSDPEAVVRNILNQVKPLSNNAERRGEDSSGAVSLGKKNPVIATILSRIRLPFPNQKQDNGGGRDKHEQIKKELKNCLADTRYLLLIDDVWSSSTWQSIWKYFPEENKKGSRIIVTTRFQAVATTCSAHKDQDHIHLVDVLSGEEANSLFIKTLSECRGNSARQSNQTKVPDRVWQMCGGLPLAIVTMAGVVASKPLMIRDEWIAVCNSLFPEPEKCHKPEEFMRIINYCYNDLPSDLKTCCLYLSIFPKGREVSRKRLIRRWIAEGFVSEKQGLSVEDVADTCFKQLIERKMMRPVEHNSNGSVKSCRVHDMVLEYIISKAAEENFITVVGSHWSMSTSSKKVRRLTIHGSDPKRAKNVDSMNLSHVRSLTVFENLDKLHFKSFKTGIVQVLDLEGCKGFRESDANVSDICEMILLKYLSLRKTDIKNLPNNISKLKYLETLDVRETEVKQLPTTVGQLERITNILGGDKRRQRTLKLPKELKGTMKSLRILSGVEIVEGSTAASDFSYFTTLRKLAIYRIHHNEDIFKNLLSSIQYLSGYSLQTLLIVDESSEFFKTLESMSPSHLTDLRALELSGKLLYLPKWLDTLQHLVKLTLSATALCTDNFLVIRKLNSLFSLTFSISEKQDPALAAILEKNKSASRGEIVVPAGGFSKLKLLRIFVPLLPSLTFSKNATPHLERIELRFKKLEGFHGVDELGKLQDVVLTVDGHASERTNSILDGLKQRLEGKCNLIVNKYHD

SEQ ID NO: 42 - protein, 979 aa, Zea mays; identical to SEQ ID NO: 41

SEQ ID NO: 43 - protein, 709 aa, Zea mays
MDLYTKYGPEFQRRAMVTVSQNSDPEAVVRNILNQVKPLSNNAERRGEDSSGAVSLGKKNPVIATILSRIRLPFPNQKQDNGGGRDKHEQIKKELKNCLADTRYLLLIDDVWSSSTWQSIWKYFPEENKKGSRIIVTTRFQAVATTCSAHKDQDHIHLVDVLSGEEANSLFIKTLSECRGNSARQSNQKEFMRIINYCYNDLPSDLKTCCLYLSIFPKGREVSRKRLIRRWIAEGFVSEKQGLSVEDVADTCFKQLIERKMMRPVEHNSNGSVKSCRVHDMVLEYIISKAAEENFITVVGSHWSMSTSSKKVRRLTIHGSDPKRAKNVDSMNLSHVRSLTVFENLDKLHFKSFKTGIVQVLDLEGCKGFRESDANVSDICEMILLKYLSLRKTDIKNLPNNISKLKYLETLDVRETEVKQLPTTVGQLERITNILGGDKRRQRTLKLPKELKGTMKSLRILSGVEIVEGSTAASDFSYFTTLRKLAIYRIHHNEDIFKNLLSSIQYLSGYSLQTLLIVDESSEFFKTLESMSPSHLTDLRALELSGKLLYLPKWLDTLQHLVKLTLSATALCTDNFLVIRKLNSLFSLTFSISEKQDPALAAILEKNKSASRGEIVVPAGGFSKLKLLRIFVPLLPSLTFSKNATPHLERIELRFKKLEGFHGVDELGKLQDVVLTVDGHASERTNSILDGLKQRLEGKCNLIVNKYHD

SEQ ID NO: 44 - DNA, 2934 bp, Zea mays
atggctatcaaacagagcatcagcttcacgctgcgtgttcttgctgatctatccctcctactcttttgcgtcctgcttgcacctgtatgttcagccacaccagccacagctcctgctgttctcctgcaagtgaagtccggcctcactgaccccggaggcgtcctctctggctggtcactggaggccgacgtgtgctcatggcatggtattacgtgcctgcccggtgaggtctcaccgggcattgtgacaggcctcaacctgtccgggcacggcctgtcaggcgtgataccgccggcgatgagtggcctcgtctccatcgagtccattgacttgtcctccaattccctcaccgggccgatcccgccagagcttggcgcgctggagaacctgaggacgctgctcctcttctccaactccctcaccggcaccatcccgccggagctcggccttctcaagaacctcaaggtgctcaggatcggcgacaacgggctgcacggcgagatcccgccgcacctgggcaactgctcggagctggagacgctcggcctggcctactgccatctgaatggcaccattcctgctgagctcggcaacctgaagctgttgcagaagctggcccttgacaacaacgccctcaccggtggcatcccggagcagatcgcgggctgcgtaagcttgcgctttctgtcagtgtctgataacatgctgcaaggcaacattccttcgtttgttggaagcttcagtgatctccagtcactcaatttagcaaacaaccagttctccggtgggattccggcggagatcggcaacctttccagcttgacgtacctcaacctgctcggtaacagcctcaccggctccattccggcagagctgaaccggctgggtcagctgcaggttctggacctgtcagtgaacaacatttctggaaaggtcagcatctctgcagcacaactgaagaacctcaagtaccttgtgctgtctggcaatctccttgatggcgccatccctgaagacctctgcgccggcgactcatcaagcctgctggagaacctgttcctcgctggcaacaatcttgaaggcggcattcaggcgctgctcagctgcactgctctccagtccatcgatgtgtcaaacaacagctttaccggagtgataccaccgggcattgaccgcctgcctggcctcatcaaccttgctctgcacaacaacagcttcaccggcgccctgccgtcgcagatagggagcctgggcaacctggaggtcctgtctctgttccacaatggcctcaccggtggaataccgccggagatcggtaggcttcagaagctgaagctcttgttcctctacgagaaccagatgtccggaaccatccccgacgagctcaccaactgcacgagcttggaagaggtggacttcttcggcaaccacttccatggtcctattcccgaaaggatcgggaacctcaggaacctgaccgtgcttcagctccggcagaatgacctgtcgggccccatcccggcgagcctcggtgagtgcaggagccttcaggcgctggcattggcagacaaccggcttaccggctcgttgcccgagacgttcgggcagctcgccgagctcagcgtgataactctctacaacaactccctcgcgggccccctgccggagtcgctgttccagctcaagaacctgaccgtgatcaacttctcccacaaccagttcaccgacagcatcgtccctcttctcggctcgacctccctcgccgtgctggcgctcaccgacaacagcttctccggcgtcatcccagcagtggtcgcccgatcaaggaacatggtccggctccagcttggcggcaaccggctcaccggcgcgatacctgccgaactaggcaatctgacaaggctcagcatgcttgacctgtcgctcaacaagctctccagcgacatcccggcagagctctccaactgcgttcagctcgcccatctgaagctcgacgggaacagcctgacgggcaccgtctctgcatggctcggcagcctcaggtcgctcggcgagctcgacctctcgtggaacgcgttgactggaggcatcccgccggagctaggcaactgctcggacctgctgaagctgtccctcagtgacaaccacctcaccggaagcatcccgccggagatcggcaggctgacgtctctgaacgttctgaacctgaacaaaaacagcctcaccggcgccataccgccagcgttgcaccaatgcgacaagctgtacgagctgagactgtcggagaactcgctggagggaccaatcccgccggagctcgggcagctctcggagctgcaggtgatacttgacctgagccggaacaggctctccggcgagatcccggcgtccctcgggggactcgtgaagctggagcggctgaacctgtcatccaaccggctggatgggcagataccgtcctcgctgctgcagctgacgagcctgcatcgcctgaacctatccggcaaccacctctcaggcgcggtgcccgcgggtctatcgggcttcccggcggcgtcgttcgtcggcaacgaactctgcgccgcgcctctgcagccgtgcgggccgcggtcgcctgctactgctaggcggctgtcgggcacggaggtggtcatgatcgttgcgggcatcgccctggtctcggcggtggtgtgcgtggcgctgctgtacaccatgctgagggtgtggagcaactggcgggcggtgtcggtgtccaactccgatggcgaggagtcggcacatggtggcggcggggggaagtgggtggacggcaagtacaggaaagtggggtcatcggtgtcttggtcgtcggaacagaagcacaactcggggtccgagaccaccagcgtgctccatggcaagtccacggaggccgccggcgccgggaagagctag

SEQ ID NO: 45 - DNA, 2934 bp, Artificial Sequence; identical to SEQ ID NO: 44
  cDNA of GSO1

SEQ ID NO: 46 - protein, 977 aa, Zea mays
MAIKQSISFTLRVLADLSLLLFCVLLAPVCSATPATAPAVLLQVKSGLTDPGGVLSGWSLEADVCSWHGITCLPGEVSPGIVTGLNLSGHGLSGVIPPAMSGLVSIESIDLSSNSLTGPIPPELGALENLRTLLLFSNSLTGTIPPELGLLKNLKVLRIGDNGLHGEIPPHLGNCSELETLGLAYCHLNGTIPAELGNLKLLQKLALDNNALTGGIPEQIAGCVSLRFLSVSDNMLQGNIPSFVGSFSDLQSLNLANNQFSGGIPAEIGNLSSLTYLNLLGNSLTGSIPAELNRLGQLQVLDLSVNNISGKVSISAAQLKNLKYLVLSGNLLDGAIPEDLCAGDSSSLLENLFLAGNNLEGGIQALLSCTALQSIDVSNNSFTGVIPPGIDRLPGLINLALHNNSFTGALPSQIGSLGNLEVLSLFHNGLTGGIPPEIGRLQKLKLLFLYENQMSGTIPDELTNCTSLEEVDFFGNHFHGPIPERIGNLRNLTVLQLRQNDLSGPIPASLGECRSLQALALADNRLTGSLPETFGQLAELSVITLYNNSLAGPLPESLFQLKNLTVINFSHNQFTDSIVPLLGSTSLAVLALTDNSFSGVIPAVVARSRNMVRLQLGGNRLTGAIPAELGNLTRLSMLDLSLNKLSSDIPAELSNCVQLAHLKLDGNSLTGTVSAWLGSLRSLGELDLSWNALTGGIPPELGNCSDLLKLSLSDNHLTGSIPPEIGRLTSLNVLNLNKNSLTGAIPPALHQCDKLYELRLSENSLEGPIPPELGQLSELQVILDLSRNRLSGEIPASLGGLVKLERLNLSSNRLDGQIPSSLLQLTSLHRLNLSGNHLSGAVPAGLSGFPAASFVGNELCAAPLQPCGPRSPATARRLSGTEVVMIVAGIALVSAVVCVALLYTMLRVWSNWRAVSVSNSDGEESAHGGGGGKWVDGKYRKVGSSVSWSSEQKHNSGSETTSVLHGKSTEAAGAGKS

SEQ ID NO: 47 - DNA, 1326 bp, Zea mays
atgaccaggcggtggccacctttctctgcccgtgtcgccgccgccgtgttcctgctgctgctatcccccgccgcgacctcccagctcggcctgggccccgccattgccgcctggattaacggctcgccgccgcctagccctgacgccgccgccgccgccgccgccgccgcctcgggcccgcggagccaggagtacgcggcgctgcaggcgctgaaggtggccgtcaccgacgaccccaagggagcgctcgcgtcgtggcagggcgccaatgtgtgcgcctacaagggcgtgtactgctccgcgccgcccgacggcgccgcggccgccggcgcgtcgacggtagtcgcgggcatcgacctcaaccgcgccaacctcaggggcacgctccccgacgcggtgtccctcctggcgcacctcaccttcctccacctcaacagcaaccggctcgggggcgccgtccccgacacgctccgggacctgcagtacctgacggagctggacctgagcaacaacctcttctcgggcccgttcccggcgtccacgctgctcatcccgtcgctggtgtacctggacctccgcttcaacgccttctccggggaggtcccgcccgaggtgttcgccaaggagctggacgccgtgttcctcaacgacaaccagttcgagggccagatcccggacacgctgtgggcgtcgcccgccacggtcatcacgctggccaacaaccacttcaccggcgccgtcccggcggcctacgagttcggcgccggcgccggggccggggccggtggccgggtccgcgaggtgctgttcctgaacaacaacctgaccggctgcgtgcccgaggcgctgggcttcctccccagcatgcaggtgctggacctcagctacaacgcgctgtcgggacacctcccggggacgctctcgtgcctgtcggggatcgaggtgctcaacctcgcgcacaaccagctcacgggcgagctcccggacctgctgtgcgacctgcgccggatcaccaacctgtccgtgtccttcaacttcttctccgggatcagccagcgctgcgaccggcagctggggagccgcggcgtgttcgacttcgtgggcaactgcgtgcccgggcgggacatgcagcggccgcagcccgagtgcgacgagttcccgggggaaggcggcctcagctgcctccgcatccccggggcgcggccagccgggtgtggcgacgcgggcgtcactattggcgtgggcgtcggagtgggcatcggggggctgccgttcgggttgccaggcgctgccgctggaggcgtggtcaccgtcaccgtgccgtga

SEQ ID NO: 48 - DNA, 1326 bp, Artificial Sequence; identical to SEQ ID NO: 47
  cDNA of LRX4

SEQ ID NO: 49 - protein, 441 aa, Zea mays
MTRRWPPFSARVAAAVFLLLLSPAATSQLGLGPAIAAWINGSPPPSPDAAAAAAAAASGPRSQEYAALQALKVAVTDDPKGALASWQGANVCAYKGVYCSAPPDGAAAAGASTVVAGIDLNRANLRGTLPDAVSLLAHLTFLHLNSNRLGGAVPDTLRDLQYLTELDLSNNLFSGPFPASTLLIPSLVYLDLRFNAFSGEVPPEVFAKELDAVFLNDNQFEGQIPDTLWASPATVITLANNHFTGAVPAAYEFGAGAGAGAGGRVREVLFLNNNLTGCVPEALGFLPSMQVLDLSYNALSGHLPGTLSCLSGIEVLNLAHNQLTGELPDLLCDLRRITNLSVSFNFFSGISQRCDRQLGSRGVFDFVGNCVPGRDMQRPQPECDEFPGEGGLSCLRIPGARPAGCGDAGVTIGVGVGVGIGGLPFGLPGAAAGGVVTVTVP

SEQ ID NO: 50 - DNA, 4212 bp, Zea mays
aaaaccctcaccacattttcctcaaccacatgatggagattggggctactagatactatgcctggtggtagactggtagctgatgtctttggaccagtagttggtgctagatttgtgaactctaccaaggtgagaaacggagatggaggctgccctgctgagcgggttcatcaaaaccatcctgccaaggctcttctcactggtacaagggagatacaagctgcacaagggcctcaagagcgacatcaaatcgctggagaaagagctccatatgatcgctgttacaatcgatgaacaaatctcgctggggaggaaggatcagggagctgtgctgagcctctcaattgatgagctgcatgaactggctcaccaaatcgaggactccatagatcgcttcttgtaccatgtgaccagggagcagcaagcatccttttttcgtcggactgtacggtcgccgaagactctgttgtcacgtcagcggctggctgccgaggttcagttcctgaagaagataccggaggaggcgcaccagcgagagaagaggtacagggtcttcgccggcctttcttcctctacccggcacactgaatcgtcttcctgttcgtctgtatctgatccgcacacacttaaggccgacgtcgtcggcatcgacggtcccagggacgagcttgtgcagcagttaaccgaagaggcagagggcctaacaaagcagctcaaggtgatctccatcgtcgggatccatggctccggcaagaccgtccttgccagagaggtatacgagagcgacgtcggccggcagttcagtctccgggcatgggtttctgctactgacagaggtccgagagaggtgctcatggagatcctccgaaattttggtaggccagtggtggatagctctagtattgaccagcttacggtagatctcaggaaacacttgggtgagaaaaggtgaaaaaaacctcttctttatgttatttattatttatgaagtttcttcaactacgggttttcatgttcaaattgcctctctgaacttcgaaaacgtttaataccaattgaattgaggatcttagctttggaaaagcggtagtgttttgacgttttgcatacatttctcaccgttattttattcatttataatttagagtttaagcagtatattcattttgaaatttatgagatttctgtctgcacgcttacttccatgcccaaaacatgtccgattgagaacagaaggtaattttgtttgatctttgagatcagacacactgattgagtagtaacaggaaacaagtgctcaccaatcacccaagtcacttacaaagaatttcatgcttacaaaacacactgattgttaaggatagagactatgtttgatctgcatagtttgaattttgattatgtcatcgtcgattgttatcattaacttttgttggaaatttctcttgtagctatttcattgtaatcgatggcatgcaaacagatcagtggagcaccattgaaactgccttcccagaaaacaatgttgttagcagcagagtaattgttacaacaacaatccggtcagtagctaattcttgcagctcttctaacggttatgtgcacaaaatgaaaagacttagtgacgaacactcagagcaattgtttatcaagaaagcttgcccaacaaaatattcaggttatactcgaccggaatcaaaagaagttctgaagaaatgtgatggtcaaccacttgctcttgttactatgggccaattcttgaggaaaaatggttggcccacaggacccaactgcgaaaatgtgtgtagagatcttagacgacatctggagcaggatgatacattggagagaatgcgaagggtgcttatccacagcttatctagtcttcctagccatgttcccaaagcctgccttttgtattttggtatgtttccatgtgatcatcccataaagaggaagagcctgatgaggcgatggttagcagagggatttgtacaaacacagccttcatctagtgaaaacttcaacaccctcatagaccggaatattattgagcccatcggcatatgtaacgatgatcaggtaaagacatgcaaaacatatggcatgatgcacgagttcattttgttaatgtccacctcccatgacttcattaccctgctttgtaataataaagttgaacacaaatatgtgcgtcggctttctctccatcatcatagtgctacaagtggcagtttttcggtcatcgacttatctcttgttagatctctgatggtttttggggaggctggcaaaactattttgagtttccgaaagtacgagctattgagagtcttggatcttgaacaatgtaccgacttggaagatgatcacctcaaagacatatgcaacctttttcttatgaaatatctaagcctcggagaaactattagaagtcttccaaaggagatagaaaaactgaagctcttggagacacttgacttgaggagaacaaaggtgaaaacactacctatagaggtcctcctgctcccctgtttactccatctgtttgggaagttccaattttctgataaaatcaagataacaagtgacatgcagaagtttttcttaactggacagagtaacttagagacactttcaggatttatcacagatgggtctcaaggattgccacagatgatgaattacatgaatttaagaaagcttaagatatggtttgagaggagtaagagaagcaccaacttcaccgatcttgtgaatgctgtccaaaagttcatccatgatgacaaagagagcaatgatccacgttctctatcacttcatttcgatgacggcactgaaaacatcctgaactctttgaaggctccttgttaccttaggtcattgaagttaaaagggaatttgctggaacttccccagtttgtcatatcaatgcggggtctccgggagatatgcctttcatcaacaaaattgacatcgggcctccttgcaacactcgctaacttgaaaggcttgcagcatctcaagctgattgcagatgtccttgaagattttatcattgaaggtcaggcattcctggggctgctacacctatgttttgtcctagaacgtgccaccttaccaataattgaaggaggagctttgccgtacctcatctcacttaagctaatctgcaaagatctagttggcctcggtgacatcaaaatcaaccgcctcaaatgtcttaaggaagtcagtctagatcatagagtcgcttcggaaacaagagaaatctgggaaaaagctgccgagaagcatccaaaccggccgaaagtattgttggtcaactcatctgatgaaagcgaaattaaggctgtagactgttctgttgcttcaagaccagctgtgagtgaggctaatggaacttctcccatgtcagaggttgatgtacgagaggatgacattcagatgatacttaaccaggggctctctgccgctgctgagaaacagatgaattgtgcagttcagccaagttcaaaagctgaactgaactctgatttcaataatattagtttcccagaggttgcgcttggtttaaccgagctgtgaattgcttggaattgaaatgtgtcttcatacacctattgatccttgattgtccatggtcagtttcgttgcacttgcagcatattactatgaggctagtatcatgtaaattacaaatcttttgttgttaaggccataaattgcatattatagcacaacaagctggtatgtctcaacaatggcattaattttttttctgcttgaatctacaaatttcatcattattttgcaatttcgcttttatacagatatggtgatgccatgtcattttgactttgcagcatatatgcaagcaacggtttgagttgctggagttgctagaatattgatacaacttcagtttactcgaaggctacagggatctcataactaggatggttgaagataatttgcgattgtttccttcagtgtcactgaaaagacttttgtaacaataaagcatacctttgcttcctacttttttgaagttacttcagatgctaagttcgcagttgggcctggactttatcatgtttatccagctgtttatttgtttcatgtacaataataccggtgattgctgttgttatataatctatatttatactatagttaaagtatcagtttcaacggttgtcccgcgccatc

SEQ ID NO: 51 - DNA, 101 bp, Artificial Sequence
  marker PZE-104115065
ttttggtgatcttcatctgttgctaccaaaaaacagttaaaagacaaacaygctgcatatctcaaagtttcaaggttggagaagttctttcatgaactgtc

SEQ ID NO: 52 - DNA, 21 bp, Artificial Sequence
  marker Mc0241 (forward primer)
tatatccgtgcatttacgttt

SEQ ID NO: 53 - DNA, 17 bp, Artificial Sequence
  marker Mc0241 (reverse primer)
catcgcttgtctgtcga

SEQ ID NO: 54 - DNA, 24 bp, Artificial Sequence
  marker Bnl3.03 (forward primer)
cgccagggttttcccagtcacgac

SEQ ID NO: 55 - DNA, 23 bp, Artificial Sequence
  marker Bnl3.03 (reverse primer)
gcggataacaatttcacacagga

SEQ ID NO: 56 - DNA, 61 bp, Artificial Sequence
  marker Affx-90199961
ttttgttcttccagcagcgtcttaccaaccktataactgcagatgtgtacaggcgcgcata

SEQ ID NO: 57 - DNA, 61 bp, Artificial Sequence
  marker Affx-90852574 (=PZE-106073551)
tggctcacctacgtgctcatcaagaactacraccgctctcttaatatcaccgtattcataa

SEQ ID NO: 58 - DNA, 45 bp, Artificial Sequence
  primer_alleleX for marker for detecting SNP at position 413 referred to rcg1 as disclosed in US 8,062,847 B2
gaaggtgaccaagttcatgctatcgcttcttgtaccatgtgacca

SEQ ID NO: 59 - DNA, 43 bp, Artificial Sequence
  primer_alleleY for marker for detecting SNP at position 413 referred to rcg1 as disclosed in US 8,062,847 B2
gaaggtcggagtcaacggattcgcttcttgtaccatgtgaccc

SEQ ID NO: 60 - DNA, 22 bp, Artificial Sequence
  primer common for marker for detecting SNP at position 413 referred to rcg1 as disclosed in US 8,062,847 B2
gcgaccgtacagtccgacgaaa

SEQ ID NO: 61 - DNA, 45 bp, Artificial Sequence
  primer_alleleX for marker for detecting SNP at position 1099 referred to rcg1 as disclosed in US 8,062,847 B2
gaaggtgaccaagttcatgctttggaaaagcggtagtgttttgac

SEQ ID NO: 62 - DNA, 47 bp, Artificial Sequence
  primer_alleleY for marker for detecting SNP at position 1099 referred to rcg1 as disclosed in US 8,062,847 B2
gaaggtcggagtcaacggattctttggaaaagcggtagtgttttgat

SEQ ID NO: 63 - DNA, 30 bp, Artificial Sequence
  primer common for marker for detecting SNP at position 1099 referred to rcg1 as disclosed in US 8,062,847 B2
gaataaaataacggtgagaaatgtatgcaa

SEQ ID NO: 64 - DNA, 47 bp, Artificial Sequence
  primer_alleleX for marker for detecting SNP at position 1250 referred to rcg1 as disclosed in US 8,062,847 B2
gaaggtgaccaagttcatgctcaatcagtgtgtctgatctcaaagat

SEQ ID NO: 65 - DNA, 47 bp, Artificial Sequence
  primer_alleleY for marker for detecting SNP at position 1250 referred to rcg1 as disclosed in US 8,062,847 B2
gaaggtcggagtcaacggattcaatcagtgtgtctgatctcaaagaa

SEQ ID NO: 66 - DNA, 25 bp, Artificial Sequence
  primer common for marker for detecting SNP at position 1250 referred to rcg1 as disclosed in US 8,062,847 B2
cttccatgcccaaaacatgtccgat

SEQ ID NO: 67 - DNA, 43 bp, Artificial Sequence
  primer_alleleX for marker for detecting SNP at position 1607 referred to rcg1 as disclosed in US 8,062,847 B2
gaaggtgaccaagttcatgctcttctaacggttatgtgcacaa

SEQ ID NO: 68 - DNA, 45 bp, Artificial Sequence
  primer_alleleY for marker for detecting SNP at position 1607 referred to rcg1 as disclosed in US 8,062,847 B2
gaaggtcggagtcaacggattctcttctaacggttatgtgcacag

SEQ ID NO: 69 - DNA, 26 bp, Artificial Sequence
  primer common for marker for detecting SNP at position 1607 referred to rcg1 as disclosed in US 8,062,847 B2
gctctgagtgttcgtcactaagtctt

SEQ ID NO: 70 - DNA, 47 bp, Artificial Sequence
  primer_alleleX for marker for detecting SNP at position 2001 referred to rcg1 as disclosed in US 8,062,847 B2
gaaggtgaccaagttcatgcttgaagttttcactagatgaaggctgt

SEQ ID NO: 71 - DNA, 46 bp, Artificial Sequence
  primer_alleleY for marker for detecting SNP at position 2001 referred to rcg1 as disclosed in US 8,062,847 B2
gaaggtcggagtcaacggattgaagttttcactagatgaaggctgc

SEQ ID NO: 72 - DNA, 25 bp, Artificial Sequence
  primer common for marker for detecting SNP at position 2001 referred to rcg1 as disclosed in US 8,062,847 B2
gcgatggttagcagagggatttgta

SEQ ID NO: 73 - DNA, 50 bp, Artificial Sequence
  primer_alleleX for marker for detecting SNP at position 2598 referred to rcg1 as disclosed in US 8,062,847 B2
gaaggtgaccaagttcatgctataaaatcaagataacaagtgacatgcag

SEQ ID NO: 74 - DNA, 51 bp, Artificial Sequence
  primer_alleleY for marker for detecting SNP at position 2598 referred to rcg1 as disclosed in US 8,062,847 B2
gaaggtcggagtcaacggattgataaaatcaagataacaagtgacatgcaa

SEQ ID NO: 75 - DNA, 29 bp, Artificial Sequence
  primer common for marker for detecting SNP at position 2598 referred to rcg1 as disclosed in US 8,062,847 B2
gtctctaagttactctgtccagttaagaa

SEQ ID NO: 76 - DNA, 46 bp, Artificial Sequence
  primer_alleleX for marker for detecting SNP at position 3342 referred to rcg1 as disclosed in US 8,062,847 B2
gaaggtgaccaagttcatgctgttggtcaactcatctgatgaaagc

SEQ ID NO: 77 - DNA, 46 bp, Artificial Sequence
  primer_alleleY for marker for detecting SNP at position 3342 referred to rcg1 as disclosed in US 8,062,847 B2
gaaggtcggagtcaacggattgttggtcaactcatctgatgaaaga

SEQ ID NO: 78 - DNA, 29 bp, Artificial Sequence
  primer common for marker for detecting SNP at position 3342 referred to rcg1 as disclosed in US 8,062,847 B2
agcaacagaacagtctacagccttaattt

SEQ ID NO: 79 - DNA, 46 bp, Artificial Sequence
  primer_alleleX for marker for detecting SNP C12305-001-K1
gaaggtgaccaagttcatgctaacagaatcttcagctcccatcttc

SEQ ID NO: 80 - DNA, 47 bp, Artificial Sequence
  primer_alleleY for marker for detecting SNP C12305-001-K1
gaaggtcggagtcaacggattgaacagaatcttcagctcccatcttt

SEQ ID NO: 81 - DNA, 25 bp, Artificial Sequence
  primer common for marker for detecting SNP C12305-001-K1
acacaccttcaataccctcctcgat

SEQ ID NO: 82 - DNA, 43 bp, Artificial Sequence
  primer_alleleX for marker for detecting SNP C12307-001-K1
gaaggtgaccaagttcatgcttcttttygcctccattttcgcc

SEQ ID NO: 83 - DNA, 45 bp, Artificial Sequence
  primer_alleleY for marker for detecting SNP C12307-001-K1
gaaggtcggagtcaacggattcttcttttygcctccattttcgca

SEQ ID NO: 84 - DNA, 27 bp, Artificial Sequence
  primer common for marker for detecting SNP C12307-001-K1
caatcttcaatgccaacaccactccat

SEQ ID NO: 85 - DNA, 47 bp, Artificial Sequence
  primer_alleleX for marker for detecting SNP C16759-001-K1
gaaggtgaccaagttcatgctagagttccccataattatgctgatga

SEQ ID NO: 86 - DNA, 46 bp, Artificial Sequence
  primer_alleleY for marker for detecting SNP C16759-001-K1
gaaggtcggagtcaacggattgagttccccataattatgctgatgg

SEQ ID NO: 87 - DNA, 30 bp, Artificial Sequence
  primer common for marker for detecting SNP C16759-001-K1
cgttgagatgctttcataatgatcaaggta

SEQ ID NO: 88 - DNA, 46 bp, Artificial Sequence
  primer_alleleX for marker for detecting SNP C16760-001-K1
gaaggtgaccaagttcatgctagactgattgatcattttaggggga

SEQ ID NO: 89 - DNA, 46 bp, Artificial Sequence
  primer_alleleY for marker for detecting SNP C16760-001-K1
gaaggtcggagtcaacggattagactgattgatcattttagggggg

SEQ ID NO: 90 - DNA, 28 bp, Artificial Sequence
  primer common for marker for detecting SNP C16760-001-K1
ttgccagagaagtatggtcttactctta

SEQ ID NO: 91 - DNA, 46 bp, Artificial Sequence
  primer_alleleX for marker for detecting SNP C12314-001-K1
gaaggtgaccaagttcatgctcatccaatggcattaagtgacctca

SEQ ID NO: 92 - DNA, 45 bp, Artificial Sequence
  primer_alleleY for marker for detecting SNP C12314-001-K1
gaaggtcggagtcaacggattatccaatggcattaagtgacctcg

SEQ ID NO: 93 - DNA, 28 bp, Artificial Sequence
  primer common for marker for detecting SNP C12314-001-K1
aaaaagtcagtacagacttgtggracat

SEQ ID NO: 94 - DNA, 717 bp, Artificial Sequence
  amplicon 2 according to figure 2
tgtatctgatccgcacacacttaaggccgacgtcgtcggcatcgacggtcccagggacgagcttgtgcagcagttaaccgaagaggcagagggcctaacaaagcagctcaaggtgatctccatcgtcgggatccatggctccggcaagaccgtccttgccagagaggtatacgagagcgacgtcggccggcagttcagtctccgggcatgggtttctgctactgacagaggtccgagagaggtgctcatggagatcctccgaaattttggtaggccagtggtggatagctctagtattgaccagcttacggtagatctcaggaaacacttgggtgagaaaaggtgaaaaaaacctcttctttatgttatttattatttatgaagtttcttcaactacgggttttcatgttcaaattgcctctctgaacttcgaaaacgtttaataccaattgaattgaggatcttagctttggaaaagcggtagtgttttgacgttttgcatacatttctcaccgttattttattcatttataatttagagtttaagcagtatattcattttgaaatttatgagatttctgtctgcacgcttacttccatgcccaaaacatgtccgattgagaacagaaggtaattttgtttgatctttgagatcagacacactgattgagtagtaacaggaaacaagtgctcaccaatcaccaagtcacttacaaa

SEQ ID NO: 95 - DNA, 22 bp, Artificial Sequence
  Forward primer of primer pair 1 for generating amplicon 2
tcctgttcgtctgtatctgatc

SEQ ID NO: 96 - DNA, 24 bp, Artificial Sequence
  Reverse primer of primer pair 1 for generating amplicon 2
gcagatcaaacatagtctctatcc

SEQ ID NO: 97 - DNA, 22 bp, Artificial Sequence
  Forward primer of primer pair 2 for generating amplicon 2
ctgaatcgtcttcctgttcgtc

SEQ ID NO: 98 - DNA, 24 bp, Artificial Sequence
  Reverse primer of primer pair 2 for generating amplicon 2
ctttgtaagtgacttggtgattgg

SEQ ID NO: 99 - DNA, 20 bp, Artificial Sequence
  Forward primer of primer pair 3 for generating amplicon 2
acccggcacactgaatcgtc

SEQ ID NO: 100 - DNA, 22 bp, Artificial Sequence
  Reverse primer of primer pair 3 for generating amplicon 2
gtgattggtgagcacttgtttc

SEQ ID NO: 101 - DNA, 698 bp, Artificial Sequence
  amplicon 3 according to figure 2
acacactgattgagtagtaacaggaaacaagtgctcaccaatcaccaagtcacttacaaagaatttcatgcttacaaaacacactgattgttaaggatagagactatgtttgatctgcatagtttgaattttgattatgtcatcgtcgattgttatcattaacttttgttggaaatttctcttgtagctatttcattgtaatcgatggcatgcaaacagatcagtggagcaccattgaaactgccttcccagaaaacaatgttgttagcagcagagtaattgttacaacaacaatccggtcagtagctaattcttgcagctcttctaacggttatgtgcacaaaatgaaaagacttagtgacgaacactcagagcaattgtttatcaagaaagcttgcccaacaaaatattcaggttatactcgaccggaatcaaaagaagttctgaagaaatgtgatggtcaaccacttgctcttgttactatgggccaattcttgaggaaaaatggttggcccacaggacccaactgcgaaaatgtgtgtagagatcttagacgacatctggagcaggatgatacattggagagaatgcgaagggtgcttatccacagcttatctagtcttcctagccatgttcccaaagcctgccttttgtattttggtatgtttccatgtgatcatcccataaagaggaagagc

SEQ ID NO: 102 - DNA, 23 bp, Artificial Sequence
  Forward primer of primer pair 1 for generating amplicon 3
atttctgtctgcacgcttacttc

SEQ ID NO: 103 - DNA, 23 bp, Artificial Sequence
  Reverse primer of primer pair 1 for generating amplicon 3
tcactagatgaaggctgtgtttg

SEQ ID NO: 104 - DNA, 20 bp, Artificial Sequence
  Forward primer of primer pair 3 for generating amplicon 3
gcacgcttacttccatgccc

SEQ ID NO: 105 - DNA, 23 bp, Artificial Sequence
  Reverse primer of primer pair 3 for generating amplicon 3
tgtgtttgtacaaatccctctgc

SEQ ID NO: 106 - DNA, 772 bp, Artificial Sequence
  amplicon 4 according to figure 2
tcctagccatgttcccaaagcctgccttttgtattttggtatgtttccatgtgatcatcccataaagaggaagagcctgatgaggcgatggttagcagagggatttgtacaaacacagccttcatctagtgaaaacttcaacaccctcatagaccggaatattattgagcccatcggcatatgtaacgatgatcaggtaaagacatgcaaaacatatggcatgatgcacgagttcattttgttaatgtccacctcccatgacttcattaccctgctttgtaataataaagttgaacacaaatatgtgcgtcggctttctctccatcatcatagtgctacaagtggcagtttttcggtcatcgacttatctcttgttagatctctgatggtttttggggaggctggcaaaactattttgagtttccgaaagtacgagctattgagagtcttggatcttgaacaatgtaccgacttggaagatgatcacctcaaagacatatgcaacctttttcttatgaaatatctaagcctcggagaaactattagaagtcttccaaaggagatagaaaaactgaagctcttggagacacttgacttgaggagaacaaaggtgaaaacactacctatagaggtcctcctgctcccctgtttactccatctgtttgggaagttccaattttctgataaaatcaagataacaagtgacatgcagaagtttttcttaactggacagagtaacttagagacactttcaggatttatcacagatggg

SEQ ID NO: 107 - DNA, 23 bp, Artificial Sequence
  Forward primer of primer pair 3 for generating amplicon 4
ggatgatacattggagagaatgc

SEQ ID NO: 108 - DNA, 24 bp, Artificial Sequence
  Reverse primer of primer pair 3 for generating amplicon 4
ctcctctcaaaccatatcttaagc

SEQ ID NO: 109 - DNA, 677 bp, Artificial Sequence
  amplicon 5 according to figure 2
tgacatgcagaagtttttcttaactggacagagtaacttagagacactttcaggatttatcacagatgggtctcaaggattgccacagatgatgaattacatgaatttaagaaagcttaagatatggtttgagaggagtaagagaagcaccaacttcaccgatcttgtgaatgctgtccaaaagttcatccatgatgacaaagagagcaatgatccacgttctctatcacttcatttcgatgacggcactgaaaacatcctgaactctttgaaggctccttgttaccttaggtcattgaagttaaaagggaatttgctggaacttccccagtttgtcatatcaatgcggggtctccgggagatatgcctttcatcaacaaaattgacatcgggcctccttgcaacactcgctaacttgaaaggcttgcagcatctcaagctgattgcagatgtccttgaagattttatcattgaaggtcaggcattcctggggctgctacacctatgttttgtcctagaacgtgccaccttaccaataattgaaggaggagctttgccgtacctcatctcacttaagctaatctgcaaagatctagttggcctcggtgacatcaaaatcaaccgcctcaaatgtcttaaggaagtcagtctagatcatagagtcgcttcggaaacaa

SEQ ID NO: 110 - DNA, 23 bp, Artificial Sequence
  Forward primer of primer pair 1 for generating amplicon 5
gtttactccatctgtttgggaag

SEQ ID NO: 111 - DNA, 22 bp, Artificial Sequence
  Reverse primer of primer pair 1 for generating amplicon 5
cgctttcatcagatgagttgac

SEQ ID NO: 112 - DNA, 20 bp, Artificial Sequence
  Forward primer of primer pair 2 for generating amplicon 5
gctcccctgtttactccatc

SEQ ID NO: 113 - DNA, 24 bp, Artificial Sequence
  Reverse primer of primer pair 2 for generating amplicon 5
agaacagtctacagccttaatttc

SEQ ID NO: 114 - DNA, 607 bp, Artificial Sequence
  amplicon 6 according to figure 2
gcttcggaaacaagagaaatctgggaaaaagctgccgagaagcatccaaaccggccgaaagtattgttggtcaactcatctgatgaaagcgaaattaaggctgtagactgttctgttgcttcaagaccagctgtgagtgaggctaatggaacttctcccatgtcagaggttgatgtacgagaggatgacattcagatgatacttaaccaggggctctctgccgctgctgagaaacagatgaattgtgcagttcagccaagttcaaaagctgaactgaactctgatttcaataatattagtttcccagaggttgcgcttggtttaaccgagctgtgaattgcttggaattgaaatgtgtcttcatacacctattgatccttgattgtccatggtcagtttcgttgcacttgcagcatattactatgaggctagtatcatgtaaattacaaatcttttgttgttaaggccataaattgcatattatagcacaacaagctggtatgtctcaacaatggcattaattttttttctgcttgaatctacaaatttcatcattattttgcaatttcgcttttatacagatatggtgatgccatgtcattttgac

SEQ ID NO: 115 - DNA, 22 bp, Artificial Sequence
  Forward primer of primer pair 1 for generating amplicon 6
caaccgcctcaaatgtcttaag

SEQ ID NO: 116 - DNA, 24 bp, Artificial Sequence
  Reverse primer of primer pair 1 for generating amplicon 6
cttcgagtaaactgaagttgtatc

SEQ ID NO: 117 - DNA, 22 bp, Artificial Sequence
  Forward primer of primer pair 3 for generating amplicon 6
tgacatcaaaatcaaccgcctc

SEQ ID NO: 118 - DNA, 23 bp, Artificial Sequence
  Reverse primer of primer pair 3 for generating amplicon 6
caaccatcctagttatgagatcc

SEQ ID NO: 119 - DNA, 618 bp, Artificial Sequence
  amplicon 7 according to figure 2
aaattgcatattatagcacaacaagctggtatgtctcaacaatggcattaattttttttctgcttgaatctacaaatttcatcattattttgcaatttcgcttttatacagatatggtgatgccatgtcattttgactttgcagcatatatgcaagcaacggtttgagttgctggagttgctagaatattgatacaacttcagtttactcgaaggctacagggatctcataactaggatggttgaagataatttgcgattgtttccttcagtgtcactgaaaagacttttgtaacaataaagcatacctttgcttcctacttttttgaagttacttcagatgctaagttcgcagttgggcctggactttatcatgtttatccagctgtttatttgtttcatgtacaataataccggtgattgctgttgttatataatctatatttatactatagttaaagtatcagtttcaacggttgtcccgcgccatctttttacaaataatccatcacaaatatttcaaattaacccgatgcacgcctatagatggccaaacggcggtccggcacgggccagatgccttcgggccacaactctggcccaggcacgtcatgccggg

SEQ ID NO: 120 - DNA, 24 bp, Artificial Sequence
  Forward primer of primer pair 1 for generating amplicon 7
gcatattatagcacaacaagctgg

SEQ ID NO: 121 - DNA, 20 bp, Artificial Sequence
  Reverse primer of primer pair 1 for generating amplicon 7
agttgtggcccgaaggcatc

SEQ ID NO: 122 - DNA, 23 bp, Artificial Sequence
  Forward primer of primer pair 2 for generating amplicon 7
aagctggtatgtctcaacaatgg

SEQ ID NO: 123 - DNA, 18 bp, Artificial Sequence
  Reverse primer of primer pair 2 for generating amplicon 7
atgacgtgcctgggccag

SEQ ID NO: 124 - DNA, 23 bp, Artificial Sequence
  Forward primer of primer pair 3 for generating amplicon 7
cttgcagcatattactatgaggc

SEQ ID NO: 125 - DNA, 19 bp, Artificial Sequence
  Reverse primer of primer pair 3 for generating amplicon 7
gggctaatgacccggcatg

SEQ ID NO: 126 - DNA, 71 bp, Artificial Sequence
  marker PZE-106066955
gccacgtgcaccccactcccatggagcttggaggcytggaggagcagaccgcatatgtacgaccaagtcgc

SEQ ID NO: 127 - DNA, 71 bp, Artificial Sequence
  marker PZE.106072681
aagcaattttgtttttctagctatccattagagaartgctctgcactttacaggatgctttgcacaacatg

SEQ ID NO: 128 - DNA, 71 bp, Artificial Sequence
  marker PZE.106073001
ttgtctaccagttgttgcagcagcaacccacggttyttcctgaagtaaaagttcctcagcttcttggcttt

SEQ ID NO: 129 - DNA, 71 bp, Artificial Sequence
  marker PUT.163a.18167596.1294
tggtgtgaactgctgatccagattgtgactcttatytgaagaggctcagccaaagatctgccccctcgtgt

SEQ ID NO: 130 - DNA, 71 bp, Artificial Sequence
  marker ZmSYNBREED_54943_173
gacggatagagtacattattttctctcagctaacaraaagtagccgaatgctgtgaggcttctgagacgac

SEQ ID NO: 131 - DNA, 53 bp, Artificial Sequence
  marker ZmSYNBREED_54946_787
agtgaacagtgaaaaatragccacatattaaatcctagctataactgaaacac

SEQ ID NO: 132 - DNA, 71 bp, Artificial Sequence
  marker PZE.106073260
caacggcagcagctgggccgtacagactgcagagaracagagtgcaccgaaacaaatgcagcagtggctga

SEQ ID NO: 133 - DNA, 44 bp, Artificial Sequence
  marker ZmSYNBREED_54949_671
gatgtggtwttaacagttgacgggcatgcaagtgagaggacaaa

SEQ ID NO: 134 - DNA, 50 bp, Artificial Sequence
  marker ZmSYNBREED_54956_986
agtacaataatatacatrgccaaaggcacacccaatttagctttaattta

SEQ ID NO: 135 - DNA, 44 bp, Artificial Sequence
  marker ZmSYNBREED_54966_239
gatctcagaagktttatgtttcacaacaagaatgtctttacttg

SEQ ID NO: 136 - DNA, 71 bp, Artificial Sequence
  marker PZE.106073623
gaaggctccacactccctcctcaaatgatctagcgmtgcagctactttgtttaagatttttcagcacctcc

SEQ ID NO: 137 - DNA, 46 bp, Artificial Sequence
  marker ZmSYNBREED_54969_202
aggccacattmcaacaaagtcgtcttcttgttcctgttcattgttg

SEQ ID NO: 138 - DNA, 71 bp, Artificial Sequence
  marker ZmSYNBREED_54969_513
ttaggttctgtgtttgtgtttcactcaatacaggaraaacagggaggtcgtgctcttcgttggaaaaataa

SEQ ID NO: 139 - DNA, 41 bp, Artificial Sequence
  marker ZmSYNBREED_54973_806
atccartcatccaccatgttggattggtaattcatgtaaaa

SEQ ID NO: 140 - DNA, 65 bp, Artificial Sequence
  marker ZmSYNBREED_54975_531
gctgaacatacaggtgcaagcaggacgcaaaagagyaggagggatagatcagcaagaacacgcag

SEQ ID NO: 141 - DNA, 41 bp, Artificial Sequence
  marker ZmSYNBREED_54977_728
cattcatgttagaacatgctttataattgtacttgwaaatg

SEQ ID NO: 142 - DNA, 71 bp, Artificial Sequence
  marker_ZmSYNBREED_54978_371
agcttgcaagtaacagtaagaatgtacatatgaaayattgagaaggagagaatctacgcatgatgggcgag

SEQ ID NO: 143 - DNA, 71 bp, Artificial Sequence
  marker PZE.106074105
tgcgctggatgcaggcatgcagcagcacatggtcaycgactcaccgttggtgtaaaatcaatagtaaattg

SEQ ID NO: 144 - DNA, 42 bp, Artificial Sequence
  marker ZmSYNBREED_54980_496
attgtcccaaaactatcaaccgagtccctgtgattsaccatt

SEQ ID NO: 145 - DNA, 71 bp, Artificial Sequence
  marker ZmSYNBREED_54981_535
agtccaagaaacgaagactccaagatcctatgtgcstgtgttggcgtcttggccaagacgctatttcattc

SEQ ID NO: 146 - DNA, 71 bp, Artificial Sequence
  marker PZE.106074333
tcttccgagatccatttcttcacagctcatgtctcmaatcgcagagatcaccctcgtccggtcctcctcgg

SEQ ID NO: 147 - DNA, 67 bp, Artificial Sequence
  marker ZmSYNBREED_54987_542
gaatgggatagttggatcaggatgtcgacatgcatktaagacacacaatatagagaggtttgggccg

SEQ ID NO: 148 - DNA, 71 bp, Artificial Sequence
  marker PZE.106074560
tgcgtgtctgtactgtaccagcgagtagcgcggcckgacgggctggtggtggagggcggcgcgcctctcgc

SEQ ID NO: 149 - DNA, 2515 bp, Zea mays
atggctctctgtgtggcagccgtagcagcgctgcacctgctgcatctcctgtccgccgcaccagcgctccacgcagccaccagcgtagcatcgccaggttgcctcagcgagtgcggcgaggtcagtataccttacccgttcggtgtcggcgccggctgctacgccgaggggttccagctcacctgcgacgagacccacgacgccccaaagctcctgttgggcaacactagtgtggtggtgctcaacatctctctgcacgacgggagcctgcacatcgacaacggcgtcgtcagtctgacggggagaagcctgtacagcatggactgggggatccccctcggcggcaacggcatcttcacgctgtcctcgttctggaacagcttcttcgtcatggggtgcgggttcaggttccaggtcaggcagccgggcgcggacaacatgatcgtcgtgtgccgttcgcggtgcctgagcgggcgtcccgcggtagccaccgacggcacctgctcgggtgctggatgctgcgaggcgtccttgcccggatcgagcagcatgtactcgatcaagctcgaatctctggacggcaccgcgacggaggagcagccgccgttcaacgccacgtttgtcatcgcggataaggagtggtggatcacaggcaaccacggtatgcttctgcaggaggccgtctcggatggccagctgggcgtgtcgtctggctccgctcttccgctgcagatcaaggctggtggcaagtggaactttggaaacctgtcttgtgcggacgctccgaggtcaagtggctatgggtgccttagctccaacagctactgccatgatcactggaacggtgaatcgtctgggtacatatgccgctgcagcgacggctacgagggcaacccttacataagaaatggatgcaaaggtctgcaacttgtcatcactgaaatataagagagaagagtcccagttccaattcttctcacagcagctagctaacatgctgtttcacataactgtgttttgcattgcagcaaatgttgacgagtgcacaatccgagacaagtaccagtgctttggtgactgcattaacgtggatggattttataagtgcgtctgtccacttggcacctctggaaaccccatggaaccacatggatgcatccaagatacagagaagttctcaggtaacacaggtaacaacgttttccaacaacctgtagcttcacaactgtctgtgacaatgttatcttttgtggggaaaaaaacactacttgaaacatatctgaatgattgaatccacatactttttttttcaggattagctgttgccacagggatttgctgtggcgggtgccttgttcttctcatcttcgctgccatcctcctgaggcaaaagctaagagcccggaaagccaagaagctgaggaacttttacttcaggaagaaccgtgggttgctgctgcaacaactggtagacaaggacattgctgaaaggatgatcttcagcctggaagagctagagaaggcaacagatacgttcaacgtggatcgcaagatcggcaagggaggccatggtaccgtctacaagggcattctgtccgaccaacgcgtcgtagccattaaaatgtcaagacgagcggtgcagagcgagactgacaacttcataaacgaggtcgccattctttcccaggtgaaccacaggaacgtggtaaagctcttcggatgctgcctggagacagaggtcccactgctagtgtacgagttcatctcgaatggaacccttcatgagcaccttcatgtcagctcttcgcagtcgttgccatggagggaacggctgaggatcgcacttgaagtcgcgcgatctcttgcgtatctacactctgctgcttccctgtcaatagttcacagggacatcaaggctaccaatattctgcttgacgacaatctaacggcgaaggtgtcggactttggagcttctcgtggcatccctattgacgagaccagaataaccaccgccatccaaggaacttttgggtacctggatccggaatgctataacacgagacggctcaccgagaagagcgacgtgtacagcttcggcgtcatgcttgtggagcttctaacaagggagaaaccgcatgtctacatgtcagcggcaggcgacagtctagtggagcagttcctgatactacacaggcaagacaagctcgctgagatactggacccgcaggttgccaaggaaggggaggaagaagcccgagtagtggccgagatcgcagcgatgtgtgtgagctcaagcggggacgataggcccaccatgaagcaagtcgagatgggactcgaggtgctgcaaagcgcagcgaccagcgttaagaacactccgagaactgaggagcacgtcgtggacattccttcagctgggcgccgacagagtggcggtactactgacgggaagaacatcagcaggcggtttagtatggaaagggaggtcttgttgtccatggatttcccacgctaa

SEQ ID NO: 150 - DNA, 2283 bp, Artificial Sequence
  cDNA of Zm00001d037635
atggctctctgtgtggcagccgtagcagcgctgcacctgctgcatctcctgtccgccgcaccagcgctccacgcagccaccagcgtagcatcgccaggttgcctcagcgagtgcggcgaggtcagtataccttacccgttcggtgtcggcgccggctgctacgccgaggggttccagctcacctgcgacgagacccacgacgccccaaagctcctgttgggcaacactagtgtggtggtgctcaacatctctctgcacgacgggagcctgcacatcgacaacggcgtcgtcagtctgacggggagaagcctgtacagcatggactgggggatccccctcggcggcaacggcatcttcacgctgtcctcgttctggaacagcttcttcgtcatggggtgcgggttcaggttccaggtcaggcagccgggcgcggacaacatgatcgtcgtgtgccgttcgcggtgcctgagcgggcgtcccgcggtagccaccgacggcacctgctcgggtgctggatgctgcgaggcgtccttgcccggatcgagcagcatgtactcgatcaagctcgaatctctggacggcaccgcgacggaggagcagccgccgttcaacgccacgtttgtcatcgcggataaggagtggtggatcacaggcaaccacggtatgcttctgcaggaggccgtctcggatggccagctgggcgtgtcgtctggctccgctcttccgctgcagatcaaggctggtggcaagtggaactttggaaacctgtcttgtgcggacgctccgaggtcaagtggctatgggtgccttagctccaacagctactgccatgatcactggaacggtgaatcgtctgggtacatatgccgctgcagcgacggctacgagggcaacccttacataagaaatggatgcaaagcaaatgttgacgagtgcacaatccgagacaagtaccagtgctttggtgactgcattaacgtggatggattttataagtgcgtctgtccacttggcacctctggaaaccccatggaaccacatggatgcatccaagatacagagaagttctcaggtaacacaggattagctgttgccacagggatttgctgtggcgggtgccttgttcttctcatcttcgctgccatcctcctgaggcaaaagctaagagcccggaaagccaagaagctgaggaacttttacttcaggaagaaccgtgggttgctgctgcaacaactggtagacaaggacattgctgaaaggatgatcttcagcctggaagagctagagaaggcaacagatacgttcaacgtggatcgcaagatcggcaagggaggccatggtaccgtctacaagggcattctgtccgaccaacgcgtcgtagccattaaaatgtcaagacgagcggtgcagagcgagactgacaacttcataaacgaggtcgccattctttcccaggtgaaccacaggaacgtggtaaagctcttcggatgctgcctggagacagaggtcccactgctagtgtacgagttcatctcgaatggaacccttcatgagcaccttcatgtcagctcttcgcagtcgttgccatggagggaacggctgaggatcgcacttgaagtcgcgcgatctcttgcgtatctacactctgctgcttccctgtcaatagttcacagggacatcaaggctaccaatattctgcttgacgacaatctaacggcgaaggtgtcggactttggagcttctcgtggcatccctattgacgagaccagaataaccaccgccatccaaggaacttttgggtacctggatccggaatgctataacacgagacggctcaccgagaagagcgacgtgtacagcttcggcgtcatgcttgtggagcttctaacaagggagaaaccgcatgtctacatgtcagcggcaggcgacagtctagtggagcagttcctgatactacacaggcaagacaagctcgctgagatactggacccgcaggttgccaaggaaggggaggaagaagcccgagtagtggccgagatcgcagcgatgtgtgtgagctcaagcggggacgataggcccaccatgaagcaagtcgagatgggactcgaggtgctgcaaagcgcagcgaccagcgttaagaacactccgagaactgaggagcacgtcgtggacattccttcagctgggcgccgacagagtggcggtactactgacgggaagaacatcagcaggcggtttagtatggaaagggaggtcttgttgtccatggatttcccacgctaa

SEQ ID NO: 151 - protein, 760 aa, Zea mays
MALCVAAVAALHLLHLLSAAPALHAATSVASPGCLSECGEVSIPYPFGVGAGCYAEGFQLTCDETHDAPKLLLGNTSVVVLNISLHDGSLHIDNGVVSLTGRSLYSMDWGIPLGGNGIFTLSSFWNSFFVMGCGFRFQVRQPGADNMIVVCRSRCLSGRPAVATDGTCSGAGCCEASLPGSSSMYSIKLESLDGTATEEQPPFNATFVIADKEWWITGNHGMLLQEAVSDGQLGVSSGSALPLQIKAGGKWNFGNLSCADAPRSSGYGCLSSNSYCHDHWNGESSGYICRCSDGYEGNPYIRNGCKANVDECTIRDKYQCFGDCINVDGFYKCVCPLGTSGNPMEPHGCIQDTEKFSGNTGLAVATGICCGGCLVLLIFAAILLRQKLRARKAKKLRNFYFRKNRGLLLQQLVDKDIAERMIFSLEELEKATDTFNVDRKIGKGGHGTVYKGILSDQRVVAIKMSRRAVQSETDNFINEVAILSQVNHRNVVKLFGCCLETEVPLLVYEFISNGTLHEHLHVSSSQSLPWRERLRIALEVARSLAYLHSAASLSIVHRDIKATNILLDDNLTAKVSDFGASRGIPIDETRITTAIQGTFGYLDPECYNTRRLTEKSDVYSFGVMLVELLTREKPHVYMSAAGDSLVEQFLILHRQDKLAEILDPQVAKEGEEEARVVAEIAAMCVSSSGDDRPTMKQVEMGLEVLQSAATSVKNTPRTEEHVVDIPSAGRRQSGGTTDGKNISRRFSMEREVLLSMDFPR

SEQ ID NO: 152 - DNA, 2300 bp, Zea mays
atgggcgggcgggccaaggttggttgctttcacccaagccacaagctgcatctcccactaggacagctagctagcgtgcgtatgtatatcgggtaaatgattaatatatgatcctagcgatcgatttcaggttcagttgattgagttgtttctttgccccgcccgttctgccaacctggtatgcccgctgtctaaaaatatactcaagctgcccgtacgtggaacggagtctgaaaatgtactcctcaactaattaaccgcgtctgtgtatgtacgtatatatgtatgtatgaaatcgtagcagtagggttccggaattagttccggaattatacagaccaattagtatagtcgatgtactactgatatatagtatactgtataatatcaattttaatttggttgggcgccaactccagattattctaatttttttgttagagattgatgatcggactacctttttacaagtactgtccagctacagagttacccttcacatgcatgcatgcgtgcgtgcacgtccttcctcgctctaggggtaggcagacagaccaatatgcaagctgttaattaggccatgttgttgttgtcttgttgatcccggccggaccacgtgcaaagggttcatatatggctgcttctcgtcgtctccttctcgcaaaaagcacatgcatgcacgtacggagtcggagacactcagacacatcagtttaggccggacggtttggacgaccgtaccgtttggttcttaattagctacaggttcctaacattagttcttcgatagcgcgagtgtgtcgtgtgtgtgtgattttcttagagggtgcatttcaatttattgttcgagtaaattaaagagatttttaatagcgagactagcgacctaattagcgctgcttaacggccgctgtcatggtgctttggcaagtatatatatacatagatcacctcctgctagctaccaatcgagaaagagacaagtgcctgtactaggatccaaaaaaattaacgtgtatataaccgcgcgcatgcaattatatataatatatatagtaccacggaccgatgcgagaaaaagagcaagggacacgtcattttcgacctggccatcacggctggcttagtttggatgtgtcggattagtatatataaaccggtggtgtttatcacgttgttgcgtcctatatagtactacgtaccggcaggtggacggcaacacgatatttttcagctccatcggacgacacacaaggagctatagcttctggtgatgtgtcgtcgtcgctcgcaataatcatcatctagctatagcagcagcgcgctctgcgttctcgtcggtaaatgataaggattcgtaccttgcttgctattgctatggggccggggcggagtaaaaaatttctttactagagacagtaaagttctggcgctaatataattgcgacgacatcctctgttaattagttcatatatggtgattattaatttgcagtgcgagagcatggtggcggtggagcggcggctcaaggagatgggcatcccgtacgtgcagcgctgcgtggaggagggcggcatcaacgtggaccagatcttcttccacgacccggacgccttcatgatcgaggtctgcaactgcgacaacctccccgtcgtcccgctcgccgccgccgccgaccagcgcgcgcctgccgtcctcggcgcctgcaagcgggccgcggcggcggtcggcgtcaagcagcagcagcagcaaagcagcggcggcgccgtgccttcttccgccgccccggcggcggccgcgcagcgcgtgccgtcggcggcgcaggcgcccatcgtccgcgtcgccgaggagtcgacgtcgcacatttcgtgcgcgtgattcttcatgccaaatggcgaggacggtcagtgtcgtgccggcctgccggatgccgtcaccgcgacggtgaccgcgcgcactgcatgtctgcgtcgagccgtgacgaagcaggcacgatgcgtcgagtcacggcaaaaagcgtctagcgcgtcgtctctgtatatgcgagtgcgtcgtcgtgtagctccatgtgcaagcaaactactgcccttttgtagtaaagaataaaaccatgtgaagagacgagtgcgtgcatcattggatatctcagctcgatctccgacccatgcatctccatcgatccaccatgtcttcacattttttttcgacaaaacacgcatattttacccccacaaaatacacaagactttttttttttggaagaacagagagtgtggaccgatggcgtgcaatgttttgg

SEQ ID NO: 153 - DNA, 402 bp, Artificial Sequence
  cDNA of Zm00001d037637
atgggcgggcgggccaagtgcgagagcatggtggcggtggagcggcggctcaaggagatgggcatcccgtacgtgcagcgctgcgtggaggagggcggcatcaacgtggaccagatcttcttccacgacccggacgccttcatgatcgaggtctgcaactgcgacaacctccccgtcgtcccgctcgccgccgccgccgaccagcgcgcgcctgccgtcctcggcgcctgcaagcgggccgcggcggcggtcggcgtcaagcagcagcagcagcaaagcagcggcggcgccgtgccttcttccgccgccccggcggcggccgcgcagcgcgtgccgtcggcggcgcaggcgcccatcgtccgcgtcgccgaggagtcgacgtcgcacatttcgtgcgcgtga

SEQ ID NO: 154 - protein, 133 aa, Zea mays
MGGRAKCESMVAVERRLKEMGIPYVQRCVEEGGINVDQIFFHDPDAFMIEVCNCDNLPVVPLAAAADQRAPAVLGACKRAAAAVGVKQQQQQSSGGAVPSSAAPAAAAQRVPSAAQAPIVRVAEESTSHISCA

SEQ ID NO: 155 - DNA, 3961 bp, Zea mays
ggcactgctcaagtaaagaaaaccagctagacaggaaaaaaaatagggaacacaagtgcgtcgtggtggtgctggcggttttgagttttgacccaccattcccgcattccttctcttctgcagtggcggcagcggcagccaggaaacgcaaacgaggaagaggagcggtcgattcccaatctttatacggtattaatcccttgcccaaatttctaatcacgccggagaaaaataaggctccgtctttgattcctttccctttcctctggttgcagattgattctttaccaattgtatcgccattccttcctgttcattgggcgtggggtttcaacctaataaatcggtccttttccgcgcaactagtggggagtggagccgctgagaaatagcaccccttttcctgccccaagatgcctgtttccgcttcttttccacgccacaccttttgaaaatccttcgccgtcagctccccttttgcagcactagttgtttctcagcctgcttggagtttggagggggcagagaacaccatcctgtcgattcaagaaaaaggctgagccgatgggcagtaagagcggcgtgcgactgcaatgcgccgaggccaaatcggcgacggattggagctgctgcttcctggccctgccaccggcagcaccatccggtgttgatggcgatggcgggtttaacctctcgtggaacctccgcaagtccttccacccgccggcgggactcttcgccagcatgggccagcaggttggggttgggttcccggggacttcttctaggtccccgtcgccggagacacctcgggatccgtacatgaagtacgtctcgccggaggttgtcgagacacctccgtcgggggaaggggtggcgttgagggacaaggggaagaagaaagccgtgaagctcaggattaaggttgtgaatcatcacctcaagaggctgatcagtggagcactcgcaggcacagtgtcaagaactgctgttgcacctttggagacgatcagaacgcatttgatggttgggagtaatgggaattcgtcgacggaggtgttccagtctatcatgaagcatgagggatggactgggttgttccgtggtaactttgttaatgtcatccgggtagccccaagcaaggcaatcgaggtaaatagctgatccacatctgttattttttttaccgtgttttcttttcaatgtacttacagtagtcacaattattcctcaccataagggcttgttcggttttaccccaatccatatggattgagggggattgagggggtttcaatccctaataagtcaaaatcccctccaatccgtatcaatccctaataagtcaaaatcccctccaatccgtatcaatcccctccgatccatatggattgaaaataaccgaacaagccctaatgtggaaatcaacccttgactacatatttgtttttttagaatatatacgtacctccttgcaaataaactgaacaatttgttggtagttacatccagtgttaatctgttgcattatttcctcatcagcaaaatcacgaaatgggtgcgggcgtgcaactgagtttgaaagaatgacttagattcagaattgacttagatacaaacaaaatgttttaaatactggaataacttagatgcaatgtataatgagttaaatattgtgagttgaaaggaatgacttagattcaatcctgcaatgcatgaatcacttagatgcaatataaaaatatcttagaaacagtgagttaaaaaatgacttagatataaataaaatgttttaaatattgtgagttggaagaaatgacttagatgtacctctgagattgccggtctgacttgttagacagtgcggactcaaaaaaagaactgttggtctgactgcaccattgagtgcaggtaatggacctttaggtgacaaatggaatacacacacacacacacacacatgctatttgtcaccctaggtaaaacttcatctagccggtaatgactaaacgatgactgagcaatatgctcaagttggtcatggagagaacaacaaacttgcttgcttttggcaatgtttgggtctcataagccccatctacaggagaagctaacactgagagttctctctaaaaaaaagggcgtacccagtgccgtaggcttcccacactgtgcggggtctggggaagggtatctttatgctttttaaaaaagtttcgtcaatttttaagaaagcattaagtttgatacatcattcatgctggggttaccagattacaagcaaaagtacaaaaaagagtaacaaagctccatgctgctattacaatgattcaaatttctatgatacctgagatgtttctaagcactttagagtttttcatgacctggaactatcaagaaaaatctagctttttgttattgacttatcttagtggaactcttacagttaagtacttgtaaccagagttaatgcaaacatgtttttaacttgtttctcctgagccaaggtcatatactcatataggctatcaggctaatcttgcaccatagagaccaatcgctttaggatgttgctgggtgcctgcgttgtctgataaattactggcttacagctgcatttagtatccgcacatcatggataggcattacatgcattctgattctggttaatttgtcacgatcataatggcgatatattgatggtgcttatggtatggacatgtatatgtatacagcatcaaaatatctgattgtttgttttgacttttttttgtgcagctttttgctttcgatacagctaacaagttcttgacccccaaatctggggaggaacggaagatcccagtccctccttcactagtggctggggcatttgcaggtgttagctcaacactgtgtacataccctctggaattgattaagacacggttaactatacaggtcagtgctaaccacaagacatatctttcataaatccggtagagtgggccttcatactaaagtacaaaacatgagaggctgtaatggttgctctctgattctgcagagaggggtgtatgacaatttccttgacgcgtttgtcaagatcgtccgcgacgaagggcctactgaactctaccgaggcttaaccccaagtctgattggagtggtgccatatgctgcaaccaactacttcgcctatgacaccctgaagaaggtgtacaagaagatgttcaagacaaatgagattggcaatgtcccaacgctgctcatcgggtctgctgcaggagctatctcaagctcagcgacattccctcttgaggttgcacggaagcacatgcaagttggagctgttggtggcaggaaggtttacaagaacatgctccatgccctcctaagcattcttgaggatgaaggggttgggggcctctacaaagggttggggccaagctgcatgaagttgatgcctgctgctgggatttcctttatgtgctacgaggcttgcaagaagattctgatcgaagaagaggatgagtgaagtgtgtgcggatgcattgcgtcattagaactcagttttgcgacatcctgaattcctgatagcaggcagcttctttcggtatttctttgagtcgactggtgctggagttggttgaaactcaagactgaggttactgctgcagtcagcataagttctttttttttgatgagtcgaccaaggggggagaggcccccaccagatccactgcattatgtagctcttcgagttcaaagtacacgccaagcacatattcttaacccccactttgcacccagtttgatcttataaattcacctgtttttttccagatttaaacttttacttttgggtacaagttgtgttgtcgaaactcatgactgcgatgtgtgaaaacgttcagatgccataggcaatcataattcacaagtggcaaagctgcacctgacctgtgttcttgtttctcat

SEQ ID NO: 156 - DNA, 1221 bp, Artificial Sequence
  cDNA of Zm00001d037640
atgggcagtaagagcggcgtgcgactgcaatgcgccgaggccaaatcggcgacggattggagctgctgcttcctggccctgccaccggcagcaccatccggtgttgatggcgatggcgggtttaacctctcgtggaacctccgcaagtccttccacccgccggcgggactcttcgccagcatgggccagcaggttggggttgggttcccggggacttcttctaggtccccgtcgccggagacacctcgggatccgtacatgaagtacgtctcgccggaggttgtcgagacacctccgtcgggggaaggggtggcgttgagggacaaggggaagaagaaagccgtgaagctcaggattaaggttgtgaatcatcacctcaagaggctgatcagtggagcactcgcaggcacagtgtcaagaactgctgttgcacctttggagacgatcagaacgcatttgatggttgggagtaatgggaattcgtcgacggaggtgttccagtctatcatgaagcatgagggatggactgggttgttccgtggtaactttgttaatgtcatccgggtagccccaagcaaggcaatcgagctttttgctttcgatacagctaacaagttcttgacccccaaatctggggaggaacggaagatcccagtccctccttcactagtggctggggcatttgcaggtgttagctcaacactgtgtacataccctctggaattgattaagacacggttaactatacagagaggggtgtatgacaatttccttgacgcgtttgtcaagatcgtccgcgacgaagggcctactgaactctaccgaggcttaaccccaagtctgattggagtggtgccatatgctgcaaccaactacttcgcctatgacaccctgaagaaggtgtacaagaagatgttcaagacaaatgagattggcaatgtcccaacgctgctcatcgggtctgctgcaggagctatctcaagctcagcgacattccctcttgaggttgcacggaagcacatgcaagttggagctgttggtggcaggaaggtttacaagaacatgctccatgccctcctaagcattcttgaggatgaaggggttgggggcctctacaaagggttggggccaagctgcatgaagttgatgcctgctgctgggatttcctttatgtgctacgaggcttgcaagaagattctgatcgaagaagaggatgagtga

SEQ ID NO: 157 - protein, 406 aa, Zea mays
MGSKSGVRLQCAEAKSATDWSCCFLALPPAAPSGVDGDGGFNLSWNLRKSFHPPAGLFASMGQQVGVGFPGTSSRSPSPETPRDPYMKYVSPEVVETPPSGEGVALRDKGKKKAVKLRIKVVNHHLKRLISGALAGTVSRTAVAPLETIRTHLMVGSNGNSSTEVFQSIMKHEGWTGLFRGNFVNVIRVAPSKAIELFAFDTANKFLTPKSGEERKIPVPPSLVAGAFAGVSSTLCTYPLELIKTRLTIQRGVYDNFLDAFVKIVRDEGPTELYRGLTPSLIGVVPYAATNYFAYDTLKKVYKKMFKTNEIGNVPTLLIGSAAGAISSSATFPLEVARKHMQVGAVGGRKVYKNMLHALLSILEDEGVGGLYKGLGPSCMKLMPAAGISFMCYEACKKILIEEEDE

SEQ ID NO: 158 - DNA, 978 bp, Zea mays
gtattcctggatagctctaatatttcgaatgtatttgggaaggtgtttgagaccatactggaagaggtattccctcctttcaattagtggtgtgtcagtgcctgttgattttaggtagtttctattatttgatttacccacaacacttctgtgcacagactggcaaattgagggaaggaaccaatgaagatatgtctatcgcaaaagccattgcaattgttatggatagaaatccacagttgaggtttgtactaatctacttcctgcctttgttcactgttcaacacaaacataccagtcattttaacagcgggttttccatgtgttcactacaggcaagaagggattgctcatgaagttcttcagtggtatttgtgccgtatggagggttggtttgccactgacgcagattcaatttcactacagggctgggatcaggtatgtttttttccttacaatctggccagtatacttgcacattgtgaaattattgtgccttatgcatgataatgttgatgggatgcaggaggtgctgcttccaggtggccatggcctcatggttcgtggatatcgtccagttataaatactcttgcaaaaggcttagatatacgtctcaaccataagtatgcataatatatcctttttattatcaatttgtattcaatagttgtagtttcactttcatcaaccattgctccagcaccgacacttgttctttgttcttcagggttttggaaattgttcgccaccggaacagggtagaggttactgtaagcagtggccaaacgttcgttgcggacactgcagtggtcactgttccgttgggtatctggtacggtttcttcaaagaaattgatgccaagaagaagcgtggtcaggttcttagagctcctcagtatctgaagcgtgtttgttatattttaaaggctgttgtttgggcaaggcgaatcaggcaagagttgatgacgagcggctaa

SEQ ID NO: 159 - DNA, 504 bp, Artificial Sequence
  cDNA of Zm00001d037642
atgtctatcgcaaaagccattgcaattgttatggatagaaatccacagttgaggcaagaagggattgctcatgaagttcttcagtggtatttgtgccgtatggagggttggtttgccactgacgcagattcaatttcactacagggctgggatcaggaggtgctgcttccaggtggccatggcctcatggttcgtggatatcgtccagttataaatactcttgcaaaaggcttagatatacgtctcaaccataaggttttggaaattgttcgccaccggaacagggtagaggttactgtaagcagtggccaaacgttcgttgcggacactgcagtggtcactgttccgttgggtatctggtacggtttcttcaaagaaattgatgccaagaagaagcgtggtcaggttcttagagctcctcagtatctgaagcgtgtttgttatattttaaaggctgttgtttgggcaaggcgaatcaggcaagagttgatgacgagcggctaa

SEQ ID NO: 160 - protein, 167 aa, Zea mays
MSIAKAIAIVMDRNPQLRQEGIAHEVLQWYLCRMEGWFATDADSISLQGWDQEVLLPGGHGLMVRGYRPVINTLAKGLDIRLNHKVLEIVRHRNRVEVTVSSGQTFVADTAVVTVPLGIWYGFFKEIDAKKKRGQVLRAPQYLKRVCYILKAVVWARRIRQELMTSG

SEQ ID NO: 161 - DNA, 3238 bp, Zea mays
atgcagcgcaggagcggcgatgtccggactccggacgctgggtttgcgctgctccccacgcggtttactattcctgatctccttccccttcctacgcatggctccccgtccattgctatgctccgccattgtccacacacctgcagccagccttctgcctttaaccccaccggcaatgtcagtagtcttgatttcctagcttccttccttccgctctctcactcctctgtaggtgcatccttgttcttcttgcatcgtatcgatctgtccatgccactggagtctgtacgtacgttgccattatacatgggctctgtttgcgtatgtatgtgcaggtgacctgatatcgacgggagggatggcaaggatactgctccatggttcgcttcatgtcaccatctttgaggcagaggagctgtcgaactccagcaggcccagcagccaggctcccgggttcctccgcaagctggttgaggggatcgaggacactgtgggcgtgggcaagggcaccagcaagatctacgccaccatcgggctcggcaagacccgcgtcggccgcacccgcaagctcaccgacgagacggccagcccgcgctggtacgagtccttccacgtctactgcgcccaccttgcctccgacgtcgtcttcaccatccgggccaagaaccccatcggcgcctccaccgtcggtgtcgcctacctccccgtccgcgatatcttcgagggccacgaggtggaccgctggctccacctctgcgacggcggcggcgacgacaaggaccgcacgccgctcgagagcggcgggaaggtccacgtcaggctccagtacttcgacatctccaaggaccacagctggggcaagggcgtgcgcagtggaaagtaccccggcgtgccctacaccttcttctcgcagcggcaggggtgcagggtgacgctgtaccaggacgcgcacgtccccgacggctttgtcccgaggatcccactcgacggcggccggtgctacgaggcgcaccggtgctgggaggacatcttcgacgccatcagcggcgctaagcacctcatctacatcacgggttggtcggtgtacacggagatcacgctactcagggacggcgcccgcccacccaggcccggcagcggcgtcacgctcggcgagctgctcaagaagaaagccggcgagggcgtccgtgtgctcatgctcgtctgggacgaccgcacctccgtcggggcgctcaagaaggacgggctcatggccacccacgacgaggagacgatgaactacttcgagggcaccgacgtacactgcgtgctatgcccgcgaaaccccgacgactccgggagcatcgtgcaggacctgcagatctccaccatgttcacgcaccaccagaagatcgtcgtcgtcgaccacgacatgccggtgcagcggtcgcagcggcagcggaggatcctcagcttcgtgggcgggctggacctctgcgacggccgctacgacacgccatgccactcgctgttccggacgctggacggcgcgcaccacgacgacttccaccagccaaacttcgccacggccgccatcgccaagggcggaccgagggagccgtggcacgacatccactgtcgcctcgaaggccccgtggcgtgggacgtgctctacaacttcgagcagcggtggcggaagcagggcggcaaggacttgctcatccagctccgggacctcgccgacgagatcatcgccccgtcacccgtcacgttcccgaacgaccccgagacgtggaacgtgcagctctttcgctctatcgacggcggcgccgcgttcgggttcccggacacccccgacgacgccaccagggccgggctcgtcagtggcaaggaccagatcatcgatcggagcatccaggacgcctacatccacgccatccgccgcgccaggagcttcatctacattgagaaccagtacttcctcggcagctcctactgctggaagcccgacgggatcaagcccgaggacatcggtgcactgcacgtcatccccaaggagctgtccatgaaggtggtgagcaagatcgaggccggcgagcggttcgcggtctacgtcgtggtgcccatgtggcctgagggcatcccggagagcggctccgtgcaggccatcctcgactggcagaggaggaccatggagatgatgtacaccgacatcgcacaggcgatccaggccaaggggatcgacgccaaccccagggactacctcaccttcttctgcctcggcaaccgggaggcgaagaagccaggggagtacgtgcccacggaggaggctgagcctgacactggctacatcaaggcccagcaaaacagaaggttcatgatctatgtccacaccaagatgatgatgggtaatccgtccgtccacccttactcctagaattactcttgatttttcgaattcgaggcgcccatcttcttagaatatattactcttgaattattatcaaaatcgaaatttgctgtgtgtgcagtggatgacgagtacatcatcgtggggtcggcgaacatcaaccagcgttccatggacggggcgcgggactcggagatcgcgatgggcgcgtaccagccgcaccacctggcggcggcgagcaggccggcgagagggcaggtgcacgggttccggatgtcgctgtggtacgagcacctgggcgcggtggacgacgcgttcacccggccggacagcgtcgagtgcatccgcaaggtgaacgccatggcagacaggtactgggacctgtacgccggcgacgggcctgagcgtgacctgccggggcacctgctcacctatcccgtcgccgtcggcactgacggctcggtcaatcagctgccggggatggagttcttcccggacacgcaggcgcgggtgcttggcgccaagtccgactacctgccgcccattctcaccacgtaggcgtgtgctctgagcctctcacaatcttttggatttactgttttccccattctggacctgaataagagcagaactagtttggtattttttaaaaaagtaaataaaaggtgcactaatgcagtgtgcataatgacgaactcattgttattttagtattgtactatcaattagtaatttttaaaatcgttgtttacctattgctggtttgatagtgttttggttagcttggctaagaaccgaggagtcgtttggttcacatatatttgtaatgtgatggatagttgagaacgt

SEQ ID NO: 162 - DNA, 2721 bp, Artificial Sequence
  cDNA of Zm00001d037643
atgcagcgcaggagcggcgatgtccggactccggacgctgggtttgcgctgctccccacgcggtttactattcctgatctccttccccttcctacgcatggctccccgtccattgctatgctccgccattgtccacacacctgcagccagccttctgcctttaaccccaccggcaatgtcagtagtcttgatttcctagcttccttccttccgctctctcactcctctgtaggtgacctgatatcgacgggagggatggcaaggatactgctccatggttcgcttcatgtcaccatctttgaggcagaggagctgtcgaactccagcaggcccagcagccaggctcccgggttcctccgcaagctggttgaggggatcgaggacactgtgggcgtgggcaagggcaccagcaagatctacgccaccatcgggctcggcaagacccgcgtcggccgcacccgcaagctcaccgacgagacggccagcccgcgctggtacgagtccttccacgtctactgcgcccaccttgcctccgacgtcgtcttcaccatccgggccaagaaccccatcggcgcctccaccgtcggtgtcgcctacctccccgtccgcgatatcttcgagggccacgaggtggaccgctggctccacctctgcgacggcggcggcgacgacaaggaccgcacgccgctcgagagcggcgggaaggtccacgtcaggctccagtacttcgacatctccaaggaccacagctggggcaagggcgtgcgcagtggaaagtaccccggcgtgccctacaccttcttctcgcagcggcaggggtgcagggtgacgctgtaccaggacgcgcacgtccccgacggctttgtcccgaggatcccactcgacggcggccggtgctacgaggcgcaccggtgctgggaggacatcttcgacgccatcagcggcgctaagcacctcatctacatcacgggttggtcggtgtacacggagatcacgctactcagggacggcgcccgcccacccaggcccggcagcggcgtcacgctcggcgagctgctcaagaagaaagccggcgagggcgtccgtgtgctcatgctcgtctgggacgaccgcacctccgtcggggcgctcaagaaggacgggctcatggccacccacgacgaggagacgatgaactacttcgagggcaccgacgtacactgcgtgctatgcccgcgaaaccccgacgactccgggagcatcgtgcaggacctgcagatctccaccatgttcacgcaccaccagaagatcgtcgtcgtcgaccacgacatgccggtgcagcggtcgcagcggcagcggaggatcctcagcttcgtgggcgggctggacctctgcgacggccgctacgacacgccatgccactcgctgttccggacgctggacggcgcgcaccacgacgacttccaccagccaaacttcgccacggccgccatcgccaagggcggaccgagggagccgtggcacgacatccactgtcgcctcgaaggccccgtggcgtgggacgtgctctacaacttcgagcagcggtggcggaagcagggcggcaaggacttgctcatccagctccgggacctcgccgacgagatcatcgccccgtcacccgtcacgttcccgaacgaccccgagacgtggaacgtgcagctctttcgctctatcgacggcggcgccgcgttcgggttcccggacacccccgacgacgccaccagggccgggctcgtcagtggcaaggaccagatcatcgatcggagcatccaggacgcctacatccacgccatccgccgcgccaggagcttcatctacattgagaaccagtacttcctcggcagctcctactgctggaagcccgacgggatcaagcccgaggacatcggtgcactgcacgtcatccccaaggagctgtccatgaaggtggtgagcaagatcgaggccggcgagcggttcgcggtctacgtcgtggtgcccatgtggcctgagggcatcccggagagcggctccgtgcaggccatcctcgactggcagaggaggaccatggagatgatgtacaccgacatcgcacaggcgatccaggccaaggggatcgacgccaaccccagggactacctcaccttcttctgcctcggcaaccgggaggcgaagaagccaggggagtacgtgcccacggaggaggctgagcctgacactggctacatcaaggcccagcaaaacagaaggttcatgatctatgtccacaccaagatgatgatggtggatgacgagtacatcatcgtggggtcggcgaacatcaaccagcgttccatggacggggcgcgggactcggagatcgcgatgggcgcgtaccagccgcaccacctggcggcggcgagcaggccggcgagagggcaggtgcacgggttccggatgtcgctgtggtacgagcacctgggcgcggtggacgacgcgttcacccggccggacagcgtcgagtgcatccgcaaggtgaacgccatggcagacaggtactgggacctgtacgccggcgacgggcctgagcgtgacctgccggggcacctgctcacctatcccgtcgccgtcggcactgacggctcggtcaatcagctgccggggatggagttcttcccggacacgcaggcgcgggtgcttggcgccaagtccgactacctgccgcccattctcaccacgtag

SEQ ID NO: 163 - protein, 906 aa, Zea mays
MQRRSGDVRTPDAGFALLPTRFTIPDLLPLPTHGSPSIAMLRHCPHTCSQPSAFNPTGNVSSLDFLASFLPLSHSSVGDLISTGGMARILLHGSLHVTIFEAEELSNSSRPSSQAPGFLRKLVEGIEDTVGVGKGTSKIYATIGLGKTRVGRTRKLTDETASPRWYESFHVYCAHLASDVVFTIRAKNPIGASTVGVAYLPVRDIFEGHEVDRWLHLCDGGGDDKDRTPLESGGKVHVRLQYFDISKDHSWGKGVRSGKYPGVPYTFFSQRQGCRVTLYQDAHVPDGFVPRIPLDGGRCYEAHRCWEDIFDAISGAKHLIYITGWSVYTEITLLRDGARPPRPGSGVTLGELLKKKAGEGVRVLMLVWDDRTSVGALKKDGLMATHDEETMNYFEGTDVHCVLCPRNPDDSGSIVQDLQISTMFTHHQKIVVVDHDMPVQRSQRQRRILSFVGGLDLCDGRYDTPCHSLFRTLDGAHHDDFHQPNFATAAIAKGGPREPWHDIHCRLEGPVAWDVLYNFEQRWRKQGGKDLLIQLRDLADEIIAPSPVTFPNDPETWNVQLFRSIDGGAAFGFPDTPDDATRAGLVSGKDQIIDRSIQDAYIHAIRRARSFIYIENQYFLGSSYCWKPDGIKPEDIGALHVIPKELSMKVVSKIEAGERFAVYVVVPMWPEGIPESGSVQAILDWQRRTMEMMYTDIAQAIQAKGIDANPRDYLTFFCLGNREAKKPGEYVPTEEAEPDTGYIKAQQNRRFMIYVHTKMMMVDDEYIIVGSANINQRSMDGARDSEIAMGAYQPHHLAAASRPARGQVHGFRMSLWYEHLGAVDDAFTRPDSVECIRKVNAMADRYWDLYAGDGPERDLPGHLLTYPVAVGTDGSVNQLPGMEFFPDTQARVLGAKSDYLPPILTT

SEQ ID NO: 164 - DNA, 1361 bp, Zea mays
atcgccccctgcgctgtgctcatgtcccctccctcctcgccatgctccctggaccaccatccccttccattggcacccgaggggatcaccccggtttttgtcgatctaggcacgagaccgcccacgccatcctcgccacactccccgccatccccttcatcggtgcccaatggcctccgagatggtcgccctcgcttgcaccatcaaataccgcgcttgcaccccgcctacccatcaataatctagccaagacctcgcaaccctgcacccgctacctcgctgagccagcaaagacaacagagcatgaggatccggacgcctaccattccagcgcgagcacctgttgccttgctgatgcacgcggagatctgcccttccccataccacgaggagacacgccccctcacgcttatcctaggtcgacagagtactgcagccaccttgtgttcgagcgtcgtgagcagtttctgtctaaagggtaaggtatgatctgtgtttgtgatcttaatctctgtttgtgatcttggggaaacctggttttccatggacgattcagtagcggtgtgcatgaaagatttgagatgcccttgctctgcttgcctggccagccgacatcccagtcttgcgttgctcgcccggccagccgacatcccagtcttgcgctgtagatcgatgtgcccgtgcctgacagtggctagcgcctctattcttaattaatttgtttttcctttttctgattggacgtttatatttagatgaatatggctttcacttcttcaaaaaacacattaggagatttggtgtgggcggtctgtaaagtacagagagatgtgaaacatgggcatcctaaacacctttagaagcttcccccctcttcacatagtactgaacaacaagtagagtcttggaaaacttcaaactgcttccttactgctgtcaaaaaatgctcaaagtatgttatctttccttatttattatgtgtgcatgagctcattgatatttttttggtactttctgcagggataacaaactacacaaattggtctttaatgttttgtttgatggcacaaaagtagcttactatgttgatgggtaggttgttagactaaggttatctgttgtagtttgtgtatgcaatttggttgttcttgtaagttaaaagtttttgttcctgtggatttgtgtatgtaaatcgagtttgagccagagtaccatgagaattgtggcaatcctgatattgatgagaaatcaccaatgtcatttgaggagatgcttcagaaggtgaagccctttgtagttgcatatgagggcatctagaatcaggaagaatgggaggtagtttcttcaattggttgcacgat

SEQ ID NO: 165 - DNA, 441 bp, Artificial Sequence
  cDNA of Zm00001d037647
atgctccctggaccaccatccccttccattggcacccgaggggatcaccccggtttttgtcgatctaggcacgagaccgcccacgccatcctcgccacactccccgccatccccttcatcggtgcccaatggcctccgagatggtcgccctcgcttgcaccatcaaataccgcgcttgcaccccgcctacccatcaataatctagccaagacctcgcaaccctgcacccgctacctcgctgagccagcaaagacaacagagcatgaggatccggacgcctaccattccagcgcgagcacctgttgccttgctgatgcacgcggagatctgcccttccccataccacgaggagacacgccccctcacgcttatcctaggtcgacagagtactgcagccaccttgtgttcgagcgtcgtgagcagtttctgtctaaagggtaa

SEQ ID NO: 166 - protein, 146 aa, Zea mays
MLPGPPSPSIGTRGDHPGFCRSRHETAHAILATLPAIPFIGAQWPPRWSPSLAPSNTALAPRLPINNLAKTSQPCTRYLAEPAKTTEHEDPDAYHSSASTCCLADARGDLPFPIPRGDTPPHAYPRSTEYCSHLVFERREQFLSKG

SEQ ID NO: 167 - DNA, 8409 bp, Zea mays
atggagttcgcaactggagcgctaggcgcccttcttcccaagctctccatgctgcttcatggtgagtacaacctggagaagggcgtcaggggggacatccagcgcgtcatgagcaagctcgagcgggttcatgctgccctccgccatgttggcgaagtgcctgtgccactggagcagatcattcgtcctggtatagtcaatatgtgggcacgcgacgtcggggagctatcctacgacatggaggacttcgtcgacaccttcctggtgcgtgtccaaggccctgaacgcaccagcaaaagaaggttattcattaagatgatagatatggtcatgaataatcgccatgatgagatcgccccagacatcaagcacttcgaaaagcgcgtccaggagatggatgatcgtcgtcaaaggtcattgaaacatttaggctgtgtttaagagggtgtttgaatgcactagagataatagttagtgtctaaaattagctaaatacatccaaacatcatagctaatagttcagttattagctatttttagtaaattagctactagttagctaactatttattagctagctaattctactagtatatttttagctaactaactattagctctattgcattcaaacaccacctaaatgtattagagctaacagttagttggctaaaaaattgctggtggaattatgtagctaacaaatagatagctaactattaactaatttactaaaaatagaaaatagttgaactagggtgtttagatgtctctagctaattttagtcactaactattagctctagtgcattcaaacacccacttaattttcactttggcttgtgtgtatatgaactttcaccttactgtctttcttccattttatttccttttctggttctaacaggtacggtgttggtactattgttcctaccgtcaaaaccttgttttatcctcgcataattgctctaaactacaccaaggccacggaccttgtcggcatcgatgaggcaagggaggaactgatcacaaggttgaccaaggaatatgacacctccactgaacaaaggcaagtctctatcgttggttttggaggacttggcaagacagcgcttgcaaaagcagtttataacaaacttaaagctaaaggggaattccattgtgcggcctttgtgtcgatgtctcggtatcctaagctcgtagaaatcttcaaggaattgctttatgagcttgacaagactgagtacaaggacgttattagcaccccaatggaaatagatgaacttataaatctagtgcacgaattccttaataaaaagaggtacgcgcgtacttataaatctcattatatgttcattccatggaaatatccatcatatcatggtttttacacaacagcgttgtgttgtcaatactaaaattgtagatctattttctgttacacccgtcaatgagtaagggtggagtttgtgcatgcgtatcttctttcatggaaaaaaacaccaaatcagtttttttttcatcattcctatattgaaatttccaagccaaatgatcacgcaactgtacatgcagttggataatatgcttatatgtattgcaattcatatctttagctatgcttacattacttctccaattaatacaataaatataggtaccttatcgctgttgatgacatatgggatactgacgcatgggcaatgatacgatacgcttttgctgagaataagctaggaagcagaataatcgtaactactcgcagaattgatgttgctgagtatgtaggtggttgttgctatatgatgaaacctcttactcgagagaaatcaaagatattattctatggacgaacatttggttctgaaggtaaatgccctcctgaactttctcatgcgtctgagaaaatattgaataaatgcggaggcgtgccattggctattattactatatctagcttgctggctagtaagtcaaaaaacataaaagaatggttctatcttgctgattctattggttccggaatactagaaagaagtgctgaaatggagattatgtggaagatactgctgcgtagctattctgatctaccagcacgattaaagacatgtttgttatatctgagtattttccctgaagattgtgagattgggatgcatcggttaatatggaggtggatagctgaaggttttttcaatggagaactagcacatggtgggctctttaagattggggaatcttgtttccacgagctcataaggagaagcatggtgcagccagtaacacttgaaggcacgggtcttgtatatgcttgtcgtgttcataatatgtttcatgatttgatcctctccatgtcacatgaagaacaatttgtttctgtagtcaatgaaaaatttggtcctcttgatgttctttctcggcggttagcattccagaacataaaaaaaagtcagtacagacttgtggaacatccacggctggcacaatcgaggtcacttaatgccattggatgtcctatatacgcgatacctccaattgaaagctataaatcattgcgtgtactggatttcgaaaattgtgcaggtattgaagaccatgatcttgttcatcttgggaaattgcatcacctcaagttccttgggctaagaaacacgtttatcggtaagctgccggaaggaatagggaacctcaagtttctgcaaacattggacctcgatggaactggtgtggaagaattacctcaagccttgcataatcttacagaattgatgtgcctaattgctgactggagaacgagagtgcccaattggattggtaacctcacgtccctgcagcacttggtgatttatcctggtgggcatgacgatgaggattctgcgagcaggtttgttaatgagctgggaaagctgagacaactaagggtgctccgttttttgataaaagcacaagatgaagggcagctgagagatttgctagagtccctatcgaatctgccagagatcgaggctatacattttgattactatggagtacagttaaatagaggtgttcagttggaacctgaaggctatgccctctctagacatattcgttccgagaaatttgccattatggaagtcctcagatacggcttcgacgatttggaggcgtaggcgagggattctctattatagaaaacaaggggacaacccacactccaaaatggatatgactacaccattacaaggtaatatctatgattaaaccagtgatactcacgtcgtctacatctgttacccttccccacgtcctctacatctgttacccttccccggagcgggattacaacctgccccagagcggccggcgctggaggctggccgtcccgtccgccgccggcgcgtccagtctcgcctcgtcgctctcgcgctccctcaggtggaagcgccggctcccgggtctcccctccctcaccctgcgcagcggctccgcggccgccgtggtcgacgctgtcgcgttccgcgtcatgtacgtcgtcgaggccgtcgtgctgggcctcgcgctctcctgcttcttcctctgcgctatgggtggttcttgcatgtttaggctctgcatagcaaacacggaggaggactggaggccgggaacggagcagtacaagttcatcgatcgaagcagccctggtgtagaacaaatcatgcctttagcatgttcatatgaatgcactgaagccgggaacggagcagtacaagttcatcgatcgatcgagacatgtgttgatagatacactgtttgatatactttcagcattgtcctttggttaccattggttctgaatgcactgaagcttctacctcgacactacatgctacatatcaaaagggcaatggtgtagaacaaatcatgcgcttctcactttcatctggttctggtttccagcgcagattctggctggatctttagcatgttcatatgaatgtccttgttcgagcatgcctcagcctgacccagacgaaaattcagaaaatgataccttaagatggcagcagcaaggggttcaacttgcattttgtaagcattgagaagacatcacgtgaagaagcctcaaaacgatcaacaattcccttttttcacaacaataattcgacactacatacaagctatatatctctcaaaaagcaatggtgtacagtgcagtggactattggtccacagaaaacagaagtttctgggcgttaacgagtacatgtgaaccttgtttagttctctctacgatctgccggatcagcactgcacattcgtcatcgtcgtcatcgccacctgactcatccttatcgcgctcgtgatctctgctaggatctgcactccttagagctctctcccaggtgggcacttttctcagcttcatagagctgtcctccattccccagactagaccacgctctgccaagcaatccatggtcgggaaccccggcgacgtccgcgcggtggtcctggacccggccgccggggccctcgcgggcctccgccgcggcggcgtgctggtggactgcacgagctcctccccgtccctcgcgcgcgaggtcgccgcggccgcggccgcggcgggctgccacgccgtcgacgcgccagtctccggcggcgtgctgcggactgcacgagctcctccccgtccctcgccattacagagctctctggtgcgtttctgaagcgaggagaaggagagagaggtcttgtgaggcagcggcggctgtatcaacggcgctgggacgggaaagcagcagagatctcacggcgctgggacggtggctgtatcaaaaacactaatcgtcgttcactactggtaatagagtgatcttgtctgttttagagtgtgggctattccctgcttttccataacagataatccctcgcctacgcctccaaatcgtcgaagccgcaccgacggctttccataatagcaaatttctcattcgttccatggaattgcgctggttggagttctcaaggctgcctctttggattaatcctggacaacttcctaacctctaccacttatggctgatggtatctgatgcggaagagcgggatctggaaatccttggggggtttccagtgcttcactccctccacttgttgattgtgaatactgaacgtgaacatgtcatgacttgtggctgtggtggattcaagaatttgaaatgctgcagtataactaaaccgctgaaatttgtacatggagctatgcccaggcttgaagtcctcgatttccatttcagtgtgcaactcctaacggattcaaaccaagaatttgattttgactttggcttgggaaacctacattggcttcagcaagccatcgttcaaatcacagcccttggtgaggaggtggagtctgtggggagagcacaggtggctctgcgggatgcaatacgtacccatctcaaccgtcctacccttgaaataaacttatttgggcaaacaatacctccagagttaccaaaggtcaggactctttgtcatctctctctcacctcatttcgttgtcttgttttcatttgccttatttcactgtttcagcaagacgacgatggagcgaaaattgtggagatatcaccggccgagagtagtcgtcaagctcaagagcgggagaaaagaagcatcgatgtggcgacgaagaaagcaacacgggtgccgtctttttacacaaagtcatcaattgatgagccaatggatcagctcataaacatgctatctgtggttgatgacgaagcctacactaagaacataaagatactatctattgtaaggtctgagggactggggaagactactctggcccaaaaagcattcgaagagctccattcgcaatttgaccgtggggcgttcgttctactaggccagaatcctgacttgaggagagtttttgctgacattctccgtggtcttgacaagcaaaggtacatagatttcccagtggcaatattggatctagtggacctgatctggctagtccgtaaatcgctcataaacaaaaggtatgtccaacccactaacatgctagtactacctttattcagctatatatttgctcaatatattgtctccgttctttttttttatttgacgtggttgattattttttcttcaaaattctaatcactcgtgtactaaaaaaaatctgtgtgttatatccatgagtgttatttcgacactgccggttaaaccggtgagtattgatttatctgattttgctttgtttgacttggttcttcttggtgtcttcagcatttcatcccatagacctataaacctgagaatatacatctagaaaacattgttaatctaagtgttgtgtgtcaatcaatcaccaaaacgaagcaccgaaatatgacataagagaccatttttgctacagttgttgtcagtagtagttactactaaatatggattataacccttggatactattatttttccaggttctttattgtatttgatgatatatgtgatgtaaaagcatgggaaattataaagtgcgctttgattgaaaataacaaccacagtgtagttcttacgacaagtcgcaacactggtattactgaaattattggtggcagcaagcaattacaacctctatcagcaactatctctaaaaatctactctgcaaaaggttatttggatcggcaggcaagtgtccttctgaactagtaaatatatgtgacaatcttgtagaagaatgtggtggaatactatctgtgatcgacgaaactgtgacattgcttgcaagtataccaccaacagtggagaactgggaggcagtgtacgccagaagaatgttggatcggtcttatcctggtttaactgacagtctaaagaattgcttactctattttactatgtttcgaagaggacatgagattagtggagaacacttaatatgtgcatggatagctgaaggttttgtacatgggcaagaggtagcagagacctaccttagtgatctagtaaaaaagaaattaatcgatgcagtggaggttgatgctggaggaaaggtcctcacgtgccgcatgtatgacttggtgcatgactttatcgtctcaaaatcaattgaagaacgatttgtttatattttaaatgactcggaaggcagagatttgtcagaagcagttcacgttcaccagcgactatacatccagggacataataacaaagaactagacctgcaaattccttggctgccccaagtgaagtcacttgtctcctgtggtactgcgccatccatcttaaagtttaagggtctacatgttatggatttaggggcctgtgaatctttgcaggctagtcatctcaagggtataaataatgtaagttctttgagatatctggtcataggaggtaagtgtatctctggcatccctaaggaaattgcgaagctggaacatttgcggacactagatttaagtgcaagtggtctaaatgaattgccagaatatgttttcatgataagaaaattggaacgcctaattgttaatagtcagatgaagatatcatatggtattgcaaagatgtctgctttacaggagctaggcgatatcaatgtcaccgacccagagttgctgaaaagtctctgtaagctaaccaaattgagggttcttagaatttccatatggtcatgggatgatagtttgaagaactattttaaacaactgtgtgacaacttgcgttcactggttcagtgcacggagaacatccagagtctctccataatgacatgctgctccctggttttcatggatgatttgggtgagaattggacccctcaatgtctccagaagctcgaggtcggttgcagcgcatttgacatattgccaagttggtttggctcactttctagtatctccacgttaacaatcgaggtctacaagctgtcacaggacataattgatacgctcggaaggctggctggtcttggttctctatccctgacatcgaaacaagtaccaaaaggatactttgtgatcggctctgacaggttcaataagctacagagcttaaagtttgtgagcaatgcaatggtagagatgtttccacgtcaacaatcaaatggcacggaacagctcaaaaggcttatgattgtgttccatgcttcacgtacacaagatgtgaacaaagatttctgctttggtttggagaacctgtcttccctagagcatgttcgtgttgaaataatttgtttcgatgccagccataacatggtgaaaaacgcagaagctgcagttcagaaagctatatctggcacaagtatcgcaaatctggaaatacgaagacttcaggaaaatagtatgacacaggacgaagcggacctctgtgatgcagtacaagagcagaataatcagaagcaccagaaaatgaagaggtactaa

SEQ ID NO: 168 - DNA, 2643 bp, Artificial Sequence
  cDNA of Zm00001d037650
atggtcgggaaccccggcgacgtccgcgcggtggtcctggacccggccgccggggccctcgcgggcctccgccgcggcggcgtgctggtggactgcacgagctcctccccgtccctcgcgcgcgaggtcgccgcggccgcggccgcggcgggctgccacgccgtcgacgcgccagtctccggcggcgtgctgcggactgcacgagctcctccccgtccctcgccattacagagctctctgcaagacgacgatggagcgaaaattgtggagatatcaccggccgagagtagtcgtcaagctcaagagcgggagaaaagaagcatcgatgtggcgacgaagaaagcaacacgggtgccgtctttttacacaaagtcatcaattgatgagccaatggatcagctcataaacatgctatctgtggttgatgacgaagcctacactaagaacataaagatactatctattgtaaggtctgagggactggggaagactactctggcccaaaaagcattcgaagagctccattcgcaatttgaccgtggggcgttcgttctactaggccagaatcctgacttgaggagagtttttgctgacattctccgtggtcttgacaagcaaaggtacatagatttcccagtggcaatattggatctagtggacctgatctggctagtccgtaaatcgctcataaacaaaaggttctttattgtatttgatgatatatgtgatgtaaaagcatgggaaattataaagtgcgctttgattgaaaataacaaccacagtgtagttcttacgacaagtcgcaacactggtattactgaaattattggtggcagcaagcaattacaacctctatcagcaactatctctaaaaatctactctgcaaaaggttatttggatcggcaggcaagtgtccttctgaactagtaaatatatgtgacaatcttgtagaagaatgtggtggaatactatctgtgatcgacgaaactgtgacattgcttgcaagtataccaccaacagtggagaactgggaggcagtgtacgccagaagaatgttggatcggtcttatcctggtttaactgacagtctaaagaattgcttactctattttactatgtttcgaagaggacatgagattagtggagaacacttaatatgtgcatggatagctgaaggttttgtacatgggcaagaggtagcagagacctaccttagtgatctagtaaaaaagaaattaatcgatgcagtggaggttgatgctggaggaaaggtcctcacgtgccgcatgtatgacttggtgcatgactttatcgtctcaaaatcaattgaagaacgatttgtttatattttaaatgactcggaaggcagagatttgtcagaagcagttcacgttcaccagcgactatacatccagggacataataacaaagaactagacctgcaaattccttggctgccccaagtgaagtcacttgtctcctgtggtactgcgccatccatcttaaagtttaagggtctacatgttatggatttaggggcctgtgaatctttgcaggctagtcatctcaagggtataaataatgtaagttctttgagatatctggtcataggaggtaagtgtatctctggcatccctaaggaaattgcgaagctggaacatttgcggacactagatttaagtgcaagtggtctaaatgaattgccagaatatgttttcatgataagaaaattggaacgcctaattgttaatagtcagatgaagatatcatatggtattgcaaagatgtctgctttacaggagctaggcgatatcaatgtcaccgacccagagttgctgaaaagtctctgtaagctaaccaaattgagggttcttagaatttccatatggtcatgggatgatagtttgaagaactattttaaacaactgtgtgacaacttgcgttcactggttcagtgcacggagaacatccagagtctctccataatgacatgctgctccctggttttcatggatgatttgggtgagaattggacccctcaatgtctccagaagctcgaggtcggttgcagcgcatttgacatattgccaagttggtttggctcactttctagtatctccacgttaacaatcgaggtctacaagctgtcacaggacataattgatacgctcggaaggctggctggtcttggttctctatccctgacatcgaaacaagtaccaaaaggatactttgtgatcggctctgacaggttcaataagctacagagcttaaagtttgtgagcaatgcaatggtagagatgtttccacgtcaacaatcaaatggcacggaacagctcaaaaggcttatgattgtgttccatgcttcacgtacacaagatgtgaacaaagatttctgctttggtttggagaacctgtcttccctagagcatgttcgtgttgaaataatttgtttcgatgccagccataacatggtgaaaaacgcagaagctgcagttcagaaagctatatctggcacaagtatcgcaaatctggaaatacgaagacttcaggaaaatagtatgacacaggacgaagcggacctctgtgatgcagtacaagagcagaataatcagaagcaccagaaaatgaagaggtactaa

SEQ ID NO: 169 - protein, 880 aa, Zea mays
MVGNPGDVRAVVLDPAAGALAGLRRGGVLVDCTSSSPSLAREVAAAAAAAGCHAVDAPVSGGVLRTARAPPRPSPLQSSLQDDDGAKIVEISPAESSRQAQEREKRSIDVATKKATRVPSFYTKSSIDEPMDQLINMLSVVDDEAYTKNIKILSIVRSEGLGKTTLAQKAFEELHSQFDRGAFVLLGQNPDLRRVFADILRGLDKQRYIDFPVAILDLVDLIWLVRKSLINKRFFIVFDDICDVKAWEIIKCALIENNNHSVVLTTSRNTGITEIIGGSKQLQPLSATISKNLLCKRLFGSAGKCPSELVNICDNLVEECGGILSVIDETVTLLASIPPTVENWEAVYARRMLDRSYPGLTDSLKNCLLYFTMFRRGHEISGEHLICAWIAEGFVHGQEVAETYLSDLVKKKLIDAVEVDAGGKVLTCRMYDLVHDFIVSKSIEERFVYILNDSEGRDLSEAVHVHQRLYIQGHNNKELDLQIPWLPQVKSLVSCGTAPSILKFKGLHVMDLGACESLQASHLKGINNVSSLRYLVIGGKCISGIPKEIAKLEHLRTLDLSASGLNELPEYVFMIRKLERLIVNSQMKISYGIAKMSALQELGDINVTDPELLKSLCKLTKLRVLRISIWSWDDSLKNYFKQLCDNLRSLVQCTENIQSLSIMTCCSLVFMDDLGENWTPQCLQKLEVGCSAFDILPSWFGSLSSISTLTIEVYKLSQDIIDTLGRLAGLGSLSLTSKQVPKGYFVIGSDRFNKLQSLKFVSNAMVEMFPRQQSNGTEQLKRLMIVFHASRTQDVNKDFCFGLENLSSLEHVRVEIICFDASHNMVKNAEAAVQKAISGTSIANLEIRRLQENSMTQDEADLCDAVQEQNNQKHQKMKRY

SEQ ID NO: 170 - DNA, 5666 bp, Zea mays
gatggcacacacatatatatcgtcgtcgatctgcaaccttagcttcaaccaaaggtacggtagtagtttccctgctgcaacagcttggcatggcgcccaagcttcctgtgctacgacgagcaaggtcgctgccgctgctttttcttgccaactttgttgtgctgcagttacaatgctcctatgggcttccgctccagaatgaaccgagacaagtaagctagctctgtttttttttcccttttcttgtgatcttggtttggtcaccttcatgcatcttggtactaccgccggcaaaatgccatgcttcagcacccccactccaaaaaagtaacgctaaagtaacggaagccatttttgacggcatcacggacgactaggcctctgaccgtggcggcgcgtgcacacgaaacagagagagagaggggaagagttatttttcggtggctagagttaggattgccgaaaattacatctatttttggtggcgagaggacagccgtaaaaaataacaaaagccaccgaaaataaccaaagtcattgaaaataacatactattttcgatagcagttctctggccgccgaaaatgactgtcgctcttgttgggctaataaggtggaaagaaaaacatcttttgattcttttaccagttttgttactaattttagggtagtgggaattgatgtgcgttggccggtcccttacctcaaatcaagcagtgggacgaaaaatacaaagtatactatatagactggtgggtattaaaaaacaaaaagataaatatatttaaaaataaagaagtcacaacaactactggaatccggctatttgtccagtgctttctatcgggtaaagaagtttttgccgagattcgcactcagcaaagttctactcttggtaacgatcatgtttaccgagagcaggactctcgacacagagaaacactcagcaaaaaacgatttgcagagtgccgaacactcggcaaacggagacaatgtacaattcgccgagcttttttgccgagtgtcagccttcaccgaatattttgcagacttcagacactcggcaaaaaagttgtttcgggtagtgaaggcgattacattatatcaattggtttctctattgtctaccacctgggaaacactttttcagctccattctgtgcaaaagtagatcaaagagctccatgaaatcattgtagcagttttgaaccgattgttcaagtcacaagtacaataatatacatggccaaaggcacacccaatttagctttaatttataaaaatcgcctgagtagtatggacgtggatagcaccagtttttctaatttgtagggaaaaatataaactaacagccaagaaattaattcatatgagcatctttcgacgactatcttgactcttgagtagtttctagggactgtcacttagctactattttttttcatgcaaccaggtaaaacggagaatatatacaccacaaattatttgataaaatgaacctatgtccaagaagcaataaaatatgtggagttatttcttacatgattaacttaattacttttgatatgtttaactctaaaaaattacttctatgtgtgattattagctaacttacgtgatggaaacatgcacataccgaacagatatacttccatgtgtcacgtttttaagaaccagagtagatagaaataattatttttacagatgagtaaattagaatcgttagtggaaatcgattttcactgatataataaaactttcaataataatattttttaggattcataagcgaggttttaaaatggcaaaaaaaatattataattacgggaagcctcacccaccaagtttggtccgtcgaagttgaaagtcacggaatttttcgcgtgctacgtggtaggtgggaatcaaacttgtgaccttagcctcacatataccgtactttaccactctactcatcaattacttcatgtttatatggtagttttgttgggcacatattataatcaattgtgtgtaaatttattatttcaggctgtaaagaaatttaaacaaaaaaattgtcaactacaaagttaaataacttttgaagtttcaacaagttttattttggtacttttcatatttgaggtcgtttgcaaaatttctattttaattttggcaaatttagatgcactttttgaaaacccaaaatgatttcaaataaaaaagtagtcaactacaaagttttataacttttagagatctacaacttttatttcgatagttttcccatacgaggtcatttggaaataacaaaaaattcaggatataaatgatttgtagtagctgttacttaagtaattcgtctataagatcatggatttttaacgaaaaccgcaagtaaaaatgatttctaaagacaattttctagtacaagcattactggtgtttaatatccgaaaccgccgtgtgagagtcaccgaattcatcaaaaaaaattatgcattccatggcgacagaatcaacaaattgcgtttaatatccaaccagcttgtctataccgcgagggggttgatggtgtgtgtgtgtttcagatatacatcatctaccttggtgggcgacaaagtgacgatgctgatcttgtcactgcttcccaccatgatctccttgcgtctgttgtcggcaggtaattaactctatatacaaattgaaatcaacccaattagttttaatgcatataaactacttgtctgtacgtgcattctgaagcaagcaagaagcggtagagtcgattatctacagctatagacatggattctccggcttcgctgctttgctcacgaaatcacagtctacaaagattgcaggtacacacaaccgttaaattgcaagtactgataaatatataaaaaaagatatatatttcctacacatatcatcatgtttaatgttttctgctggcaggtctgcctggcgtagttagtgtaacgaaaaaccgagtccaccacacacgcacaactcgaagctgggactttgtggggctgcactacaacgacgatcagccaaacggtttgctcgcaaaggcggctaaatacggagacgacgtcattgtcggcgtcatcgactcaggcttctggccagagtcgcctagctacgctgaccacggctacggcccccctccttcgcgatggaagggagtctgccagggcggcgacgacggctcgttcggcccgaacaactgcaaccgcaaggtcataggggcgcggtggtacgctgccggcgtgagcgacgacaaggagaggctcaagggcgagtacatgtcccccagggacgccgaaggccacggaacccacacctcctccacggcggccggcaacgtcgtcggcaacgtcagcttccacgggctggcggccggcgcggcgcgaggcggcgcgcctcgcgccaggctcgctatttacaaggcctgctggggcgcgcccccgttgtcgggctcgtgcgacgacgccgatgtgatgaaggccatggacgatgccgtccacgatggcgttgacgtcctctcggtctctatcggcgggccctctgagacgccgggcacgttgcatgtcgtcgcgagtggggtcacggttgtctacgccgctgggaatgatgggcctgtcgcccagatggtggagaactcgtccccgtggctgttcaccgtcgccgcaacgactgtggataggatgttccccacagccatcaccctgggaaacaaccagattgtgcatggtacgtgcatacactagctagattctatgatgattgtcttaggagtttgtccatatttgacaaccaattaacatcgcgcacaagtcgctgatgattttttttaaggtcaatccttatacgtggggacgcaagggagagaagatcatttccacgaggtcgtgcccttggtgaactcagggtatatatatatgattgattcgtacactaaccaatgtcaattattcaccaacgaatatgcatgtgttaaataaaactgagaataatatggcaacgaatatttggcgtacatataataatgagtattaaaacgtcggtgtatatacatacagttgtgatccagagtacgtaaacagcagcgatgtgaaggggaagattgtcttctgcatcacaccggacagcttgtatccatctgctacagttactgctgttgcacagctagtgttggacaatggagggaaagggtttatattcacgggatataacagggacaatatcgttcggtgggaacctgttacaagcaaaatgataccattcattttaatcgatcttgaggtcgcctaccacatcttgcagtactgcatgtacgtacgtaaacactgatcgattaacatatattatatcgatgctggttatatcacacactaatcctctgaagcagctcaactgacggtaccccaagagcaaagatctctttggctcaaacaacttttggaactggggttcctgcccccaaggtagcagtgttctcgtctagaggacctagtgccgtctatccaggcgttcttaaggtaccttagctaccttctatatataattctctgtcttgtcattcatcccatccatttcttctacaacagtcctcttcaaactaacattattgtttccatgcatacacatgaataatattcaacagcctgatatagctgcacctggggtgaacatcttagctgccgccccacaaattccttattacaaagagcagctgggtggcgtcctgtaccattttgagtctggaacatccatggctacccctcatgtgtctggtatcgtcgccctgcttaaatcattgcatcctgactggtcacctgcggccctcaaatcggcgctcatgacaactggtatgtgtattaaataatctcgccttgctagcttaaacaaccatgtccaatacaagaattgtcttaaacaacattgttattgtccccctgcatgcagcacttaccaccgacaacaacgggatcccgatacaagcagatggaaacccagtaaagatcgccgacgctttcgattacggagcagggtttgtcaacccaaccaaggctgacgatcccggtctcatatacgacatccaaccgtcagattacctcaggttcttcgactgcacgggagggttgggtaccaacgacaactgcacggcacctagggcatctgttgtagacctcaaccttccgtcgatcgcaatccctagtctcaaggcgccccaaaccgtcacgcgcaccgtcaccaacgttgggcgccagactaacgcagtgtacagagcagtcctccagccgcctccgggcgtggagatgtccgttgaaccgtcggtcttggtcttcgatgccaagaggaaagcacagagcttcaaggtggccttcaaggcgacgcgtcggttccagggcgactacaccttcggtagcttggcatggcacgacggaggcagccactgggttcggatcccggttgcggtccgcatcgtaatccaggatctgtattcgaccgtctcttgaatcgatcccattgcggaactcgtctagaaaaagaaataatgttacatgaagctagcgagtgtttccataaggaaccctcgctcgtggtgccaagaccgtatttggtgcatatatatgaaaaatatatatccttaattttgcttgggttggtt

SEQ ID NO: 171 - DNA, 2328 bp, Artificial Sequence
  cDNA of Zm00001d037651
atggcgcccaagcttcctgtgctacgacgagcaaggtcgctgccgctgctttttcttgccaactttgttgtgctgcagttacaatgctcctatgggcttccgctccagaatgaaccgagacaaatatacatcatctaccttggtgggcgacaaagtgacgatgctgatcttgtcactgcttcccaccatgatctccttgcgtctgttgtcggcagcaagcaagaagcggtagagtcgattatctacagctatagacatggattctccggcttcgctgctttgctcacgaaatcacagtctacaaagattgcaggtctgcctggcgtagttagtgtaacgaaaaaccgagtccaccacacacgcacaactcgaagctgggactttgtggggctgcactacaacgacgatcagccaaacggtttgctcgcaaaggcggctaaatacggagacgacgtcattgtcggcgtcatcgactcaggcttctggccagagtcgcctagctacgctgaccacggctacggcccccctccttcgcgatggaagggagtctgccagggcggcgacgacggctcgttcggcccgaacaactgcaaccgcaaggtcataggggcgcggtggtacgctgccggcgtgagcgacgacaaggagaggctcaagggcgagtacatgtcccccagggacgccgaaggccacggaacccacacctcctccacggcggccggcaacgtcgtcggcaacgtcagcttccacgggctggcggccggcgcggcgcgaggcggcgcgcctcgcgccaggctcgctatttacaaggcctgctggggcgcgcccccgttgtcgggctcgtgcgacgacgccgatgtgatgaaggccatggacgatgccgtccacgatggcgttgacgtcctctcggtctctatcggcgggccctctgagacgccgggcacgttgcatgtcgtcgcgagtggggtcacggttgtctacgccgctgggaatgatgggcctgtcgcccagatggtggagaactcgtccccgtggctgttcaccgtcgccgcaacgactgtggataggatgttccccacagccatcaccctgggaaacaaccagattgtgcatggtcaatccttatacgtggggacgcaagggagagaagatcatttccacgaggtcgtgcccttggtgaactcaggttgtgatccagagtacgtaaacagcagcgatgtgaaggggaagattgtcttctgcatcacaccggacagcttgtatccatctgctacagttactgctgttgcacagctagtgttggacaatggagggaaagggtttatattcacgggatataacagggacaatatcgttcggtgggaacctgttacaagcaaaatgataccattcattttaatcgatcttgaggtcgcctaccacatcttgcagtactgcatctcaactgacggtaccccaagagcaaagatctctttggctcaaacaacttttggaactggggttcctgcccccaaggtagcagtgttctcgtctagaggacctagtgccgtctatccaggcgttcttaagcctgatatagctgcacctggggtgaacatcttagctgccgccccacaaattccttattacaaagagcagctgggtggcgtcctgtaccattttgagtctggaacatccatggctacccctcatgtgtctggtatcgtcgccctgcttaaatcattgcatcctgactggtcacctgcggccctcaaatcggcgctcatgacaactgcacttaccaccgacaacaacgggatcccgatacaagcagatggaaacccagtaaagatcgccgacgctttcgattacggagcagggtttgtcaacccaaccaaggctgacgatcccggtctcatatacgacatccaaccgtcagattacctcaggttcttcgactgcacgggagggttgggtaccaacgacaactgcacggcacctagggcatctgttgtagacctcaaccttccgtcgatcgcaatccctagtctcaaggcgccccaaaccgtcacgcgcaccgtcaccaacgttgggcgccagactaacgcagtgtacagagcagtcctccagccgcctccgggcgtggagatgtccgttgaaccgtcggtcttggtcttcgatgccaagaggaaagcacagagcttcaaggtggccttcaaggcgacgcgtcggttccagggcgactacaccttcggtagcttggcatggcacgacggaggcagccactgggttcggatcccggttgcggtccgcatcgtaatccaggatctgtattcgaccgtctcttga

SEQ ID NO: 172 - protein, 775 aa, Zea mays
MAPKLPVLRRARSLPLLFLANFVVLQLQCSYGLPLQNEPRQIYIIYLGGRQSDDADLVTASHHDLLASVVGSKQEAVESIIYSYRHGFSGFAALLTKSQSTKIAGLPGVVSVTKNRVHHTRTTRSWDFVGLHYNDDQPNGLLAKAAKYGDDVIVGVIDSGFWPESPSYADHGYGPPPSRWKGVCQGGDDGSFGPNNCNRKVIGARWYAAGVSDDKERLKGEYMSPRDAEGHGTHTSSTAAGNVVGNVSFHGLAAGAARGGAPRARLAIYKACWGAPPLSGSCDDADVMKAMDDAVHDGVDVLSVSIGGPSETPGTLHVVASGVTVVYAAGNDGPVAQMVENSSPWLFTVAATTVDRMFPTAITLGNNQIVHGQSLYVGTQGREDHFHEVVPLVNSGCDPEYVNSSDVKGKIVFCITPDSLYPSATVTAVAQLVLDNGGKGFIFTGYNRDNIVRWEPVTSKMIPFILIDLEVAYHILQYCISTDGTPRAKISLAQTTFGTGVPAPKVAVFSSRGPSAVYPGVLKPDIAAPGVNILAAAPQIPYYKEQLGGVLYHFESGTSMATPHVSGIVALLKSLHPDWSPAALKSALMTTALTTDNNGIPIQADGNPVKIADAFDYGAGFVNPTKADDPGLIYDIQPSDYLRFFDCTGGLGTNDNCTAPRASVVDLNLPSIAIPSLKAPQTVTRTVTNVGRQTNAVYRAVLQPPPGVEMSVEPSVLVFDAKRKAQSFKVAFKATRRFQGDYTFGSLAWHDGGSHWVRIPVAVRIVIQDLYSTVS

SEQ ID NO: 173 - DNA, 1593 bp, Zea mays
caatgaaacaggaagtttaaggagaagaacaaagtggacaaggtagtcgtgctgtggactgcaaacactgaaaggtacaacaatgtatgcgcttgtctcaacgacacaatggagaatctactggcatctgtggacaagaacgaggcggagatctcgccatcaacactatatgccattgcctgtgtcacagagggggtgtcgttcatcaatgggagcccccagaacacttttgtgcctggtgtgtttagtttggtgtgtttgcaaagttttatggtgttgcatttctgttcaaagacttattatacttgttgcatgtttgtagggctgattgatcttgctatcaagaacaactgcctgatcggtgttgacgacttcaagagtggcagaccaagatgaaatcagtcctggttgatttccttgttggtgctagaataaaggtacaatttatcaatgaaacctgatatccccccttcgaaatgtttttggcagacgtcatacttacaataattcttgtatatgttcatgcagcccacctcgattgtgagctacaaccacttgggaaacaacaacggcatgaacctgtctgcccctcaaacattcaggtccaaggagatctccaagagcaacgtggtggatgacattgtctcaagcaatgccattctctatgggcccggcgagcatcccgatcatgttgttgtcatcaaggtctgttagctgaacttccacctctttaaaaagatggcacatgcagcagtttaaacgtagatttacattgaaacttgccactcatttgttgcatgcagtatgtgccgtacgtgggagatagtaagagggctatggacgagtacacatcagagatctttatgggcagcaagaacaccatcatgctgcacaacacctgcgaggactcgctcctcaccgcaccgatcatccttgatctggtgcttctggctgagcttagcaccaggatctagctaaaacctgagggaacggtaagagcccaccaagtgaataacccgaagcatgctaggtgattcagcgcttcagcacttcagcaccatcatctaatgtctctcattatgcaagacaagttccactccttccactcggtggccaccatccttagctacctcaccaaggcaccactagtaagccttttcgcctgcattaattctggcatcgctgcaccgcatcttgctccaatccaatcgctaatcttctcttacaaaacctgaacgacaggttccgcccggcacaccggtggtgaacgctctggcaaagcagagggcgatgctggagaacatcatgagggcctgcgttggcttggccccagagaacaacatgatcctggagtacaagtgagcgaagtggcgtggcctgcagctggatatacaggaggctgcatgaagggaactagagaggcgagattagctgtgggattgtgttggcttctcgtgttttcttttgcgttctttcctggtcatcgctgtcgagttgttgtattttatttgttggactctcgtgccaacaatgtcatcaagcgtgtatggtggtgcgtgcctgagactgacgatgtacgagggaacttctacc

SEQ ID NO: 174 - DNA, 624 bp, Artificial Sequence
  cDNA of Zm00001d037652
atggagaatctactggcatctgtggacaagaacgaggcggagatctcgccatcaacactatatgccattgcctgtgtcacagagggggtgtcgttcatcaatgggagcccccagaacacttttgtgcctgagtggcagaccaagatgaaatcagtcctggttgatttccttgttggtgctagaataaagcccacctcgattgtgagctacaaccacttgggaaacaacaacggcatgaacctgtctgcccctcaaacattcaggtccaaggagatctccaagagcaacgtggtggatgacattgtctcaagcaatgccattctctatgggcccggcgagcatcccgatcatgttgttgtcatcaagtatgtgccgtacgtgggagatagtaagagggctatggacgagtacacatcagagatctttatgggcagcaagaacaccatcatgctgcacaacacctgcgaggactcgctcctcaccgcaccgatcatccttgatctggttccgcccggcacaccggtggtgaacgctctggcaaagcagagggcgatgctggagaacatcatgagggcctgcgttggcttggccccagagaacaacatgatcctggagtacaagtga

SEQ ID NO: 175 - protein, 207 aa, Zea mays
MENLLASVDKNEAEISPSTLYAIACVTEGVSFINGSPQNTFVPEWQTKMKSVLVDFLVGARIKPTSIVSYNHLGNNNGMNLSAPQTFRSKEISKSNVVDDIVSSNAILYGPGEHPDHVVVIKYVPYVGDSKRAMDEYTSEIFMGSKNTIMLHNTCEDSLLTAPIILDLVPPGTPVVNALAKQRAMLENIMRACVGLAPENNMILEYK

SEQ ID NO: 176 - DNA, 948 bp, Zea mays
atgtcgttcggtcgccgttcatggcaaatcctcgccctatccatggtgctcctctccaccgctgccacggccgtgtccaagcggaccggcgagctaacggtgttctggggccggaacaaggaggagggcactctgcgagaggcttgcgacacagggctgtacaacacggtcatcatctccttctacagcgtcctcggccgtggaagctacggggtagacctctcaggccatccgctggacggcgtcggcaccgacatcaagcgctgccagtccaagggaatcccggtcttcctctccatcggcagcggcggcggaggcaacggctactccctctcgtcctccgagtcggcggtagccgtcgcggacaacctctggaacgcgtacctcggcggcggccgcagcgacgtgccccgcccattcggcgacaccgtggtcgacggcatcgatttctacatcgacaaccaccagggtgcccccgacgacctctacgacgagcttgccagacgcctcgacggctacaacagccaagccagcgtgaggaagcgggtgaggctgacggcgacgccgcggtgcgcgttgccgcaagggcgcctggagacggcgatgcagacgggattgttcgagcgcatccacgtccgcttctacggcgacgacgagtgcacccacagcaacggtgccgtcgacaagcactgggacaagtgggcggcgaggtaccccgccagccagctgtacgtggggctcgccgcggcggagagcggcgtgccggaaggcgcggcgccgcccgtcgaggtctacctcaaatacctctactacagtctgctgcccaaggtgcagtcggcgcccaactatggtggcatcatgatctgggacaggttcagtgacaagagaaccagctacagcggggctgtcaagggctgggcgtcatgcagctatgctgggtgtgtttaa

SEQ ID NO: 177 - DNA, 948 bp, Artificial Sequence; identical to SEQ ID NO: 176
  cDNA of Zm00001d037653

SEQ ID NO: 178 - protein, 315 aa, Zea mays
MSFGRRSWQILALSMVLLSTAATAVSKRTGELTVFWGRNKEEGTLREACDTGLYNTVIISFYSVLGRGSYGVDLSGHPLDGVGTDIKRCQSKGIPVFLSIGSGGGGNGYSLSSSESAVAVADNLWNAYLGGGRSDVPRPFGDTVVDGIDFYIDNHQGAPDDLYDELARRLDGYNSQASVRKRVRLTATPRCALPQGRLETAMQTGLFERIHVRFYGDDECTHSNGAVDKHWDKWAARYPASQLYVGLAAAESGVPEGAAPPVEVYLKYLYYSLLPKVQSAPNYGGIMIWDRFSDKRTSYSGAVKGWASCSYAGCV

SEQ ID NO: 179 - DNA, 972 bp, Zea mays
atgtcgtcgttcggacgcaattcatggtgtatcctcgtgctggcctccgtgctcctcctgtcctgcctcgccgacacggccgtggccaagcgaacaggcgagctcaccgtcttctggggccggaacaaggaggagggcacactgcgtgaggcctgcgacaccgggctctacaacaccgtcatcatctccttctacagcgtgttcggccacggccgctacgccctcgacctctccggccacccgctggacggcgtcggcgccgacatcaagcactgccagtccctgggcatcccggtcttcctctccatcggcggcgggggaaaccactactccatcccttcctccgcgtccgcggaggccgtcgcggacaacctgtggaacgcgttcctcggcggcggcaacagcgacgtgccccgccccttcggtgacgcggcggtcaacggcatcgacttctacatcgacgaccacagcgcaccgggcgaccactacgacgagctcgcgcgccgtctcgactacttcaacagcatgtactaccacgccacgacgaagtacgtacggctgacggcgacgccgcggtgcgcgttcccgcccgacgaccccatggcgcgggcgctgcggacggggctgttcgagcgcatccacgtccgcttctacggcgacgccgacaagtgctcgtacaagaacggcgacgtgtccggcgtcgtggaccagtggagcaagtggacggcgaggtaccccaagagccagctttacgtggggctcgccgcggccgagagcggcgtgccggaccacgcgccgccccccgttgaggtctacctcaaatacctctactacgatctgctgcccaaggtgcagaaggcgcccaactatggtggcgtcatggtctggaataggttcaccgacaacaggaccggatacagcggcgccgtcaagggctgggcggcttgcagctatgctggctgtgttaactaa

SEQ ID NO: 180 - DNA, 972 bp, Artificial Sequence; identical to SEQ ID NO: 179
  cDNA of Zm00001d037656

SEQ ID NO: 181 - protein, 323 aa, Zea mays
MSSFGRNSWCILVLASVLLLSCLADTAVAKRTGELTVFWGRNKEEGTLREACDTGLYNTVIISFYSVFGHGRYALDLSGHPLDGVGADIKHCQSLGIPVFLSIGGGGNHYSIPSSASAEAVADNLWNAFLGGGNSDVPRPFGDAAVNGIDFYIDDHSAPGDHYDELARRLDYFNSMYYHATTKYVRLTATPRCAFPPDDPMARALRTGLFERIHVRFYGDADKCSYKNGDVSGVVDQWSKWTARYPKSQLYVGLAAAESGVPDHAPPPVEVYLKYLYYDLLPKVQKAPNYGGVMVWNRFTDNRTGYSGAVKGWAACSYAGCVN

SEQ ID NO: 182 - DNA, 2130 bp, Zea mays
atggattccgcgcccggccccgctccccgctccacacctgtttgctcctcagacaattcaggaactgtaaaagcttgggtgatcgtggccgtcgtcggcctgttcgccttgcacgtcctgggttcgctacgccggcggtccagcaacagcctcctccacgctacagtgatggcagtctccacactctcctactcgctagtgggctacatcgttggggagatgcgtcgctcggatttctactactacgacttcgccgtgtgggcagtgttcgtgcttctgctcctcggcagcacggacagcctcacggcctgccgcctcgacgacatcgacgactggaggagcatctacgtgaaacacctctacaaggcatccttggtggtcattgtcattgtatacaccatcggcggcaatagggataccaagtacctgtggtggccactggccgccttcctgtttgtcggcgttgtcaagtgctacgtgaggatcgcttccatgaggatggtgagcaagtcctacctgtgcagggaggtgaaggtgattgctgaatacatgcagcacaaggacaacctgctggtgcccttcgatcccgtcaccatgcaaggctacagttacattgtcgatggcgagaagtactgcgtcgtcgccaagaagcagcctgctgatgggcgcacaccatggtaccgcatgaacagtaatgttaccacggtggagcaggtctggcagtgcactggcagactgctgcaccttggcaaacggggcaagctgctcaaggacttgtgcctctccatggcgctatccaagatgctcaacagaaggtttgctggcttcgagctctcagagtcccaccttgagaaaacccatgacttggttttcaaaggcctcctcgccggggacgacgacgccccacatgagagagccttcagggtcatcgaggaagagctagcttttatccatgacttgtactacacaaggtactattacctccaccaaaagggacgatacatggctctctgtccacccgtcgtcatgtttgccctatgctcatggctcacctacgtgctcatcaagaactacaaccgctctcttaatatcaccgtattcataacggtcgtcttggcattcctggagttataccagctctacttgtacatagcctctggttggttcaaggtggcgctgatactgagctacatctccacaccatcctcgcaaagaaacggttgctgccttgagatgatcatcggccgtctcgtgaggttgaaggcgattcagccgtggaaggatacacttgggcagtactgtctcctccaggacttgggccgcagaagcagctggtttagggattgttgtttccattatgctactctgggtcttatggacaaggccccggccaggaaaaagaagaaggggcgaaagagctcagtcaagctgtccaaaaatgttaagaaagccatagctgagtccctactaggaagcaacggctacctcaccaatggggtgacatcgctacaaaacaatggcgtacatgctcggctcgcgtgggcatgtgatgctagttccacccaaggatcggtgactcgaacaatacttgtgtggcacgttgctaccaccctgtgctggcagctggacgatgcagcacaagccaaggacgaagaagtcgcaaccacgacggcctccactttgtcggagtactgcatgcacctccttgctttcgcaccaaggttcttgcccgaccacagcgctatatcggaatccatactggaacagtcagtcgacgaagcaggacagctactaaaaggggccaagaacctggagcagaggtgtaagatactcatggacagtaccaccaccaatggtggtggtgcagctgatgaagaagcacccctcgtggtgcagggcgctcggcttgcgaggcatctgatggatggcatacaggaacccacattgcggtggaaggtcctctctgatttctgggcagagatggtgctgtatgtctcgccgtccgacgatgcccgagtgcacctagaagctcttgctagaggaggggagttcgtcacgcacctttgggcgctgctcacacacgccggtgtgctgaagcgaggctatacacggccattggatgtggtctga

SEQ ID NO: 183 - DNA, 2130 bp, Artificial Sequence; identical to SEQ ID NO: 182
  cDNA of Zm00001d037658

SEQ ID NO: 184 - protein, 709 aa, Zea mays
MDSAPGPAPRSTPVCSSDNSGTVKAWVIVAVVGLFALHVLGSLRRRSSNSLLHATVMAVSTLSYSLVGYIVGEMRRSDFYYYDFAVWAVFVLLLLGSTDSLTACRLDDIDDWRSIYVKHLYKASLVVIVIVYTIGGNRDTKYLWWPLAAFLFVGVVKCYVRIASMRMVSKSYLCREVKVIAEYMQHKDNLLVPFDPVTMQGYSYIVDGEKYCVVAKKQPADGRTPWYRMNSNVTTVEQVWQCTGRLLHLGKRGKLLKDLCLSMALSKMLNRRFAGFELSESHLEKTHDLVFKGLLAGDDDAPHERAFRVIEEELAFIHDLYYTRYYYLHQKGRYMALCPPVVMFALCSWLTYVLIKNYNRSLNITVFITVVLAFLELYQLYLYIASGWFKVALILSYISTPSSQRNGCCLEMIIGRLVRLKAIQPWKDTLGQYCLLQDLGRRSSWFRDCCFHYATLGLMDKAPARKKKKGRKSSVKLSKNVKKAIAESLLGSNGYLTNGVTSLQNNGVHARLAWACDASSTQGSVTRTILVWHVATTLCWQLDDAAQAKDEEVATTTASTLSEYCMHLLAFAPRFLPDHSAISESILEQSVDEAGQLLKGAKNLEQRCKILMDSTTTNGGGAADEEAPLVVQGARLARHLMDGIQEPTLRWKVLSDFWAEMVLYVSPSDDARVHLEALARGGEFVTHLWALLTHAGVLKRGYTRPLDVV

SEQ ID NO: 185 - DNA, 3077 bp, Zea mays
accgctgctgccatcgcagccgcattcgcttctccgccgcttacgcttcaagaaaccccaccggtactccgtggccatcgacgccgccaagtggcgcttagcagccgcagcacatacccggacctgaccgctgagaagggcaacgcggacgcgccgagatgcagagcatgtcggcgtcctgctcgtccgccgtctccgtctctacctctagagtctgggccgcggcgcgccgctcgccctcgccccgatccctaccctcgttgcgccacgtcgccttctggccctctccatcctcctcctacccctcttcttctcatggctgtcgctggccgatcgccggcgccggcgcaccggcgctcccgctcggcattcgcgggggcctgcgccggctgccctcgcctctgcttgcgccggacgcccccagtgccggcgcggcggcgaggacgcgggcggccgcggccgcggcgtctccggcagcagccggtaagcaggagggcgccgccggcatttcgcagaccctgcaactcgggacaatgatcctcgtctggtacctcctcaacatctacttcaacatctacaacaagctggtccgccgtttcgtcctgttccccaagtcttttcgtaatggggttgcgcaaccaaatgggatcttctaattaaattctttcgaaaattgcgagttgggcaggttctgaaagccatacctttcccttacaccatcaccaccttccatttcgcatccggaaccttcttcatcacactcatgtggctgctcaatctgcatcccaaaccgaggctctccctcaaacaggtactccttccgtttcaaagacgttttggccttttttttatcgaatatatttatagatacatactatgaatagaaatggcaaaaacgtcttataattataacttggaaaggaggaagtaataaacaaaaaagattgactaaactgcaccaatgtaaagctggttcactcgtgtaactgatgcgatgcagtatgcaaagctcctgcctttggccttgatccacatgcttggaaatgttttcaccaatatgagtttgggtaaggtgtctgtctccttcacccacaccatcaaggccatggagcccttcttctcggtcctcctctctatcctattcctaggagaggtaattggttggttcgcacctttgctagattatttgtcctcaaagttggaatccttcatataaacatctgtttctgtattctgtctctacagacaccttctctaccagtgttgggctcacttgtccctattgttggtggagttgtattggcgtcgatgactgaagtttcattcaactggtaatttattgctttaaagcgtcaaagaatttactcaaggaaatattgtgtatttgattctaatattaggagaaaacaggattggattctggagtgccatgacttcgaatcttatgaatcaatcgcggaacgtttacagcaagaaaattctcgctgataaagaggtgagccttttgcgcttataatgttccctaactgtagatccacaacagttcagcatgatatatgctgtgaacactacaccccctaactagacttgttcttattacaggacagtttggatgatataaatctcttctcaataataactgtcatggcattcttgttatctgctccactgatgctatgtgtagaaggaatcaagtttagcccatcgtatctacagaatgctgtaagtgtggccagcatgaaaaacaagaaattttggaatatttcaacactttactgacatgaaattgctgaatactaaactttctgggttttcagggagttaatgtaaaagaattatttataagagcggcacttgctgggacatctttctatttttaccaacaggtgaggccagtctgtctccgctcaaaacattttttgtagtctctcggaggttgctaaaattgtctgttagtggctactgcggttggctacttaggtccaaacaaactacttactacttgcttgcagataatatatacgttttgtccattgttttattgctaggaataggatcaggccattccagttaaatatgatattatctccagttatgttgaacaatttttcagctctcctgtgtcatctcatgaaaaaatgttgaatatcagttttttttagcctaaaaactactccctccgccttaaaatagtagttgttttaactattgatttttatatctatattcaaatggatgataatgaatcaacacacatagagaaaacacatgcatcaaaaattgtatgaactcactaattatctaaaacgattactattttgggacggacggagtatagaattttcctcattagtgtctatcagttttttggactatctcgtatctaactgttactatgaattctgttgcacactgaattatgtctaatgaagtctctatttatttctcggcaggtttcgtacagtttattggctagagtatctcccgtgacccattcggttgccaactctcttaaacgtgtggtggtcattgtgtcatccgttctcttctttagaactctaatttcacctataaatgccttaggtacagcagtgattaatattcttcatgcaaatgccagttacttaccatctcatcaatgtctgaattgtaagtttttttctttgcctgcaggaaccggtgttgctcttgctggagtgttcctgtactcgcagttcaaaaagtcaaaaccaaaggctacggctgcatgaagacaacccctgatgatgaggtaacagactatagaatgatggaggatttggaactatcagttgacgtggtgaagcagactggccttcacggtagcaaacacatgtagtttctccatgctgcatcttaaaaaaaatgtgttctcttgtcaggttctttggatgtgagaagcttgtacgtcagtttcctggacaaggtgtggtggaacacgtgaacaacgaagatatagcattattagatttcaagagaatacaaattttggaatatacttcaatgtcattgaaactgacagaatgctctcacttacatatattctttacgtcaaaata

SEQ ID NO: 186 - DNA, 1284 bp, Artificial Sequence
  cDNA of Zm00001d037659
atgcagagcatgtcggcgtcctgctcgtccgccgtctccgtctctacctctagagtctgggccgcggcgcgccgctcgccctcgccccgatccctaccctcgttgcgccacgtcgccttctggccctctccatcctcctcctacccctcttcttctcatggctgtcgctggccgatcgccggcgccggcgcaccggcgctcccgctcggcattcgcgggggcctgcgccggctgccctcgcctctgcttgcgccggacgcccccagtgccggcgcggcggcgaggacgcgggcggccgcggccgcggcgtctccggcagcagccggtaagcaggagggcgccgccggcatttcgcagaccctgcaactcgggacaatgatcctcgtctggtacctcctcaacatctacttcaacatctacaacaagctggttctgaaagccatacctttcccttacaccatcaccaccttccatttcgcatccggaaccttcttcatcacactcatgtggctgctcaatctgcatcccaaaccgaggctctccctcaaacagtatgcaaagctcctgcctttggccttgatccacatgcttggaaatgttttcaccaatatgagtttgggtaaggtgtctgtctccttcacccacaccatcaaggccatggagcccttcttctcggtcctcctctctatcctattcctaggagagacaccttctctaccagtgttgggctcacttgtccctattgttggtggagttgtattggcgtcgatgactgaagtttcattcaactggattggattctggagtgccatgacttcgaatcttatgaatcaatcgcggaacgtttacagcaagaaaattctcgctgataaagaggacagtttggatgatataaatctcttctcaataataactgtcatggcattcttgttatctgctccactgatgctatgtgtagaaggaatcaagtttagcccatcgtatctacagaatgctggagttaatgtaaaagaattatttataagagcggcacttgctgggacatctttctatttttaccaacaggtttcgtacagtttattggctagagtatctcccgtgacccattcggttgccaactctcttaaacgtgtggtggtcattgtgtcatccgttctcttctttagaactctaatttcacctataaatgccttaggaaccggtgttgctcttgctggagtgttcctgtactcgcagttcaaaaagtcaaaaccaaaggctacggctgcatgtaacagactatag

SEQ ID NO: 187 - protein, 427 aa, Zea mays
MQSMSASCSSAVSVSTSRVWAAARRSPSPRSLPSLRHVAFWPSPSSSYPSSSHGCRWPIAGAGAPALPLGIRGGLRRLPSPLLAPDAPSAGAAARTRAAAAAASPAAAGKQEGAAGISQTLQLGTMILVWYLLNIYFNIYNKLVLKAIPFPYTITTFHFASGTFFITLMWLLNLHPKPRLSLKQYAKLLPLALIHMLGNVFTNMSLGKVSVSFTHTIKAMEPFFSVLLSILFLGETPSLPVLGSLVPIVGGVVLASMTEVSFNWIGFWSAMTSNLMNQSRNVYSKKILADKEDSLDDINLFSIITVMAFLLSAPLMLCVEGIKFSPSYLQNAGVNVKELFIRAALAGTSFYFYQQVSYSLLARVSPVTHSVANSLKRVVVIVSSVLFFRTLISPINALGTGVALAGVFLYSQFKKSKPKATAACNRL

SEQ ID NO: 188 - DNA, 4023 bp, Zea mays
tctccaagcccacacctgctggcaccgcgaaactctcgagggggcatgcttccaattttctgcaagtcgagaccgccgtcgaagcaccggcgccaatgaagacttgaagagggctaaaacgaaaaagatgccacaaaaatttccttagcggcaaaaccttcgctctgcgccgccatcgcctgctcccgtccggccaccacatccgcccaggagctcaccgtcggggacgctgctcgaggagctgcgctgtctctcccgcgccgcaaccttcgccctcgccgccgccatgatctgcgcgagtaatgcccctctccctccctcgcatgtctgtctactaaccctagcttctctgatccgtcgtttcgtgagctaacacgtcccgtgtcgcttccttgtagtctccggcgaggtgccggacgagccggtggtgtcgaagaagtcggggcttctcttcgagcggcggctcatcgagcgctacattgaggtccgtagcttggcctcagacctcgcgcaaacctcgcgctgcaatttttttattgggattgggaaaaatgtttgtgctaaattcatgtcatggtggcgatggccaatgtttatgctaaattcatgtcgtgatggcgatgcccacgacattgcaggaccatggcaagtgccccatcaccaaggaggagcttactatggatgatatcgtgtcggtcaagaccaacaaggtatggtttctctggtatgctatcaatatgttgagtcaaagtttccagtagcatgtggtatgggctttagagtatcagtaggcaatatgtgtttcacaacgttgctcttgatactaagtgaggaagacgatgagcatcagtagcgaaattatgtcttgtatggttgctcaatgtagcgcctccgcctccttctattccgcctccttctgttccgccaccgctaccgcaacgacgatggcgataagcacgggcccctccatcgcctctgcctcgctgcgtgcggcctctgcgccgccccgttgtcgtcccctccatcctccccctcgccccttgactgatgggtaccatcccaagtcaactaggaaggcctctttcttctgctttgcaacataggcagcagggtcttcttggggagaggtctaagatttctatgagtacactaaacaagaacattgtatccagtcagccgccccttgtttcatcatctgctgatttgactattccaaaggtatcaggaaattctcatatgcatgcctcctaatttctgatagcaagacactttgatgtagtggttgtttccattttttatggaatatctgtatccgagattcatgtttgcttgttcccctcatatatatatatatatatatatatatatatatatatatatatatatatatatatatatatatatatatatatatatatatatttaacacagacaactgctacaccgttgttactagcttcacctcatcagtctactagtgtgtcaacgagtttgcatactggatttctgcgttctcgaagtacctcaggtggcttgctagcttaacacattcatgacaacattagttactcaagccttttaccttttatttacagttacattgtcatgcctatcttttataggattgcctaggcaaccttcatatactactggatttgggattgctttaaatatagagacacttgttgccgtcacggaacaaagagatacaccaattgaggttggttttgttttctgagtttcctcttttgggttaatacataactcatctcgtgctaatggacttttcttaacttagacacctccacctgaagttcaggacaagattctttttatgatcaacaatatatccatctccaatatggaagttaaggcaaaggaatttaacgaggtcatacaggaacagtattatccttggtttgcacaatacatggtcatgaaaaggtatcattctcaattactgattttgtatagatttgtctgacaatgctgaggtatacaaatcacttctcatcttaacagggcaagcattgaaccaaatttccatgatctgtatctgaagttctttgataaagtaaactcaaaatccttgaacaaggaaatactgaaagccacatatgagaattgcaaggtttttgttctctccaattcgtctgccctgtttttattttttgctagccattttgtttaaacttggatacttttgctgcaggtcttgttaagatcagaccttatcaaatctagttccgaggagcgctccttgctaaaaaaacctaggcagttggttgggaaagttcaccattggtaggaatcaggcactaagggctataaggagattgatccaaaatctcttatcgtggaggtactgcttctctgcattaaactcattggtagttggagacttggagttccaaaagctcccttaggttgtctagatcctttatttagtattgctctatattatttaatatgatatttctgtttcacctgtgttttttggtaaaatttatgtgcttcctgaggtgtacaattcacttcaatgttaataatcagatgacaaacactgtgacaaacatgaaccggtatattctttcattatcagatgacaaacaattggtccccgggcttatttctctaatagaacagggaactgatgttctgcgtgtgaaggcccttttgtttgttgctctgctttgcaagaatagtcgaaggtggcttcctcatttcttttgcaatgcaaaattaatatcagctgttgatagactgggaaaggagaaggagggttttattcatcattgtacagaagcatttgtgcagttggttgcttccttggtccctggtattcttgacactgtctccagcgatatacagcaggttatggttggcaaacgtcatggacctgttactgctttagctgggcgagctcatccaaagagcacaattcatctgttccctgttattcttcatcttctaggaagtgcatccttcaagcatagagttgtgacaggccatgtattgcttcagttggcaaatcttattaagattttggaggcaccatttcaggtatgattttttgtgaactttatggatatttcatcctgatgagatgagagtatgttgagattttgttcattatacaactgcaactttggtgcttgtcttttcaatgttttggatcacatgaactttatggatatttatgtgtttctgccctagctacccatggccatgctaaatgttcttttgggatttcaggtgctatttaagaaccttactgttgacataaaggatgtgaaaccaacttccctgctcaaagatcgtctgcgtgaagtcgagggaaatccagatttttcaaataaagatgttactgcatctcaaacccctgtggttgcagaagtcccttcagggaccatcccttcactaactcatatggaacaacaacctgagatcaatatcacatcccgagctatgagccttccaaatatacttaatcaggttgtctttgaacttctgtatcgaatatgtggtacactcttctgccattatagttggaatatattttctttgcagtatgctgctcctgtccgtctacctacaaacaacacggtagaagatgacaaagttgctctgatgatgcctgagcaagtgccctcgttgacccaggtttcgccagcacaaacacaatcaacatcaccatctccattttcggttaaccaggttaacttaatgttttaactgctattatttatctaaacaactagattatgttatatgatttgttttcatttgtgatatgtagcttatggcggctattccacgtgaagagatacgtttcaaaataaatccaaagctcggctcccttggtccacaactgcaatatagcaagtatgcctccaagtttctgaaaggaatttgttatattttatttcgtatttaatctgaacttcttttgttgctgataaattacttgctttatctagaattatggatttggctttggataaggttaacagggagataata

SEQ ID NO: 189 - DNA, 1770 bp, Artificial Sequence
  cDNA of Zm00001d037661
atgatctgcgcgatctccggcgaggtgccggacgagccggtggtgtcgaagaagtcggggcttctcttcgagcggcggctcatcgagcgctacattgaggaccatggcaagtgccccatcaccaaggaggagcttactatggatgatatcgtgtcggtcaagaccaacaagacaactgctacaccgttgttactagcttcacctcatcagtctactagtgtgtcaacgagtttgcatactggatttctgcgttctcgaagtacctcaggattgcctaggcaaccttcatatactactggatttgggattgctttaaatatagagacacttgttgccgtcacggaacaaagagatacaccaattgagacacctccacctgaagttcaggacaagattctttttatgatcaacaatatatccatctccaatatggaagttaaggcaaaggaatttaacgaggtcatacaggaacagtattatccttggtttgcacaatacatggtcatgaaaagggcaagcattgaaccaaatttccatgatctgtatctgaagttctttgataaagtaaactcaaaatccttgaacaaggaaatactgaaagccacatatgagaattgcaaggtcttgttaagatcagaccttatcaaatctagttccgaggagcgctccttgctaaaaaaacctaggcagttggttgggaaagttcaccattggtgtacaattcacttcaatgttaataatcagatgacaaacactgtgacaaacatgaaccggtatattctttcattatcagatgacaaacaattggtccccgggcttatttctctaatagaacagggaactgatgttctgcgtgtgaaggcccttttgtttgttgctctgctttgcaagaatagtcgaaggtggcttcctcatttcttttgcaatgcaaaattaatatcagctgttgatagactgggaaaggagaaggagggttttattcatcattgtacagaagcatttgtgcagttggttgcttccttggtccctggtattcttgacactgtctccagcgatatacagcaggttatggttggcaaacgtcatggacctgttactgctttagctgggcgagctcatccaaagagcacaattcatctgttccctgttattcttcatcttctaggaagtgcatccttcaagcatagagttgtgacaggccatgtattgcttcagttggcaaatcttattaagattttggaggcaccatttcaggtgctatttaagaaccttactgttgacataaaggatgtgaaaccaacttccctgctcaaagatcgtctgcgtgaagtcgagggaaatccagatttttcaaataaagatgttactgcatctcaaacccctgtggttgcagaagtcccttcagggaccatcccttcactaactcatatggaacaacaacctgagatcaatatcacatcccgagctatgagccttccaaatatacttaatcagtatgctgctcctgtccgtctacctacaaacaacacggtagaagatgacaaagttgctctgatgatgcctgagcaagtgccctcgttgacccaggtttcgccagcacaaacacaatcaacatcaccatctccattttcggttaaccagcttatggcggctattccacgtgaagagatacgtttcaaaataaatccaaagctcggctcccttggtccacaactgcaatatagcaaaattatggatttggctttggataaggttaacagggagataata

SEQ ID NO: 190 - protein, 590 aa, Zea mays
MICAISGEVPDEPVVSKKSGLLFERRLIERYIEDHGKCPITKEELTMDDIVSVKTNKTTATPLLLASPHQSTSVSTSLHTGFLRSRSTSGLPRQPSYTTGFGIALNIETLVAVTEQRDTPIETPPPEVQDKILFMINNISISNMEVKAKEFNEVIQEQYYPWFAQYMVMKRASIEPNFHDLYLKFFDKVNSKSLNKEILKATYENCKVLLRSDLIKSSSEERSLLKKPRQLVGKVHHWCTIHFNVNNQMTNTVTNMNRYILSLSDDKQLVPGLISLIEQGTDVLRVKALLFVALLCKNSRRWLPHFFCNAKLISAVDRLGKEKEGFIHHCTEAFVQLVASLVPGILDTVSSDIQQVMVGKRHGPVTALAGRAHPKSTIHLFPVILHLLGSASFKHRVVTGHVLLQLANLIKILEAPFQVLFKNLTVDIKDVKPTSLLKDRLREVEGNPDFSNKDVTASQTPVVAEVPSGTIPSLTHMEQQPEINITSRAMSLPNILNQYAAPVRLPTNNTVEDDKVALMMPEQVPSLTQVSPAQTQSTSPSPFSVNQLMAAIPREEIRFKINPKLGSLGPQLQYSKIMDLALDKVNREII

SEQ ID NO: 191 - DNA, 4067 bp, Zea mays
accagatcggtgatctgacggcgtggacccgatgctgatcgaatgacccaaagagacggattgcaggcctgttccaccgcgcggcctcgatttccccttaacacaacacagaggaagcaggcggcggcgatcgggcgatggcatggcgggcgagcctgtctcggagcctaaaggagatccgcgtcctcttctgtcagtcctccccggccagcgccgccgcccggtacaaatctcacgcatcttcgatttcactctctaaagtcgctgcttctgatttggtgcgttggtgatctggtcgcccccagtgagttcgtgaagaagaactatggtgacatcaaggctcgcaacccctccctccccttccttgtccgcgagtgctccggtgtccagccccagctctgggcgcgctacggtacgcgtccatccatttcttctgtctcctgctgtagctgaagatctgattttaactggttggggccgtttcttgggtggatttcatatatctgtctgccgtgtggaatggctcaatctgtactgccggatcttgccgttggcgacgtgcatttgagggaagaggaatttaggcgattagattatgagaaataagtgtataaatgcaagccacatgttggtttgtcatactcaactactgtacaaatctgctagtttgcgtgatgataacctgttgggcccagtcgatacgtttacatgtgccctgcatcagcatcctggtcaatcacaatggtctcgtaccagcattttattcaatttaggggtgccttgtggtcttatgtgttgttcaattttattgtagaatagagacaatgctcaactttacaggcatggccagactgttcctccacagacagtatcttgtattccctccattcgaaagtatatatgacattagatttgtcttaagtcaaactgctttttattcgactgagtttatggaaatatgcaccaacatctacaacaccagattagatcattaaattcgccatgaaatatgtttttgatagttaattattgaacctgtagatgttattcctaaatgtttggtcagtttacataagtttgacacaggataaagcaaaaatgatctataatttggaatggaaggagtaatttgtattttgttaatctcaactggcttacctgcaggtgctgattttatatattaatgacactgatttaatttcatagccatattgcagttcatgtagcaaagaaaatatcatgaagttttctcttaaaagttttagcatactatgaccataagcacatatggaaccaggaacaatttggaaagatgtaggattagtatcacgatctcaccttctaaattcagtaatttactaatgtcttctcaggatccatgtcctgagcattagatttccagggaactagattttatgcttctcagctagataatatggaataacctctgtctatggtaccaactttatcttattttggcagataagtaactcgtaggcttcactaatcagtggaattagaaactagatcatcaatatgcattaaagacattgcttttattagattattgattctattttttctgtgtccactattttagctgaatgaaagtggagagccattaacccatcattatacaaggcaatattttgttatgtttaagaattttgtttaacaaatgcacactatatatttcagtgtgtcattatttcaaaacttctaggcgctaggcaagtttgggcgaaggggttctgcctagcacttgggcactcctaggcgttgcctaggcatttcttttggtttagctttttcctgaccagcttttctgagaatctggttgtgaggagaatctagctgtgtagagaatctagctgtgagaagaatctagctgtgtagagaatctagctgtgagaagaatttagctgtgtagagaatctaagtatcattaggattacgtgcggagaaagataaatgtgtccataaggcttaggatctagaaagtgacggatttatactattgcaacgactcaaccgattatgtgtttatgttgattttgattggtttttacccaaacgaattttatagaatttggttgaaaagctgagcgtttggtagtccacaacagcttttggtggccagaagctgtaaaaaactgaaacaaacaggggctatgggtagtttgcctattcccatggcaaataaagaaacttttgcatatctgaacaaaaattgatattatcatgcatacttaagtaatataattgtagttcatgtttttccatttctgtgtcaggttcatcagataagtgttgtggaaatgcatatgttgcgtttgatttgtagctatacaagaagagatcaggttcggaatgatgatatacgtgattggctaggggtagcaccaattaaagaaaagcttgtctaacaatggttgagttgagatgatttgtacatgtccaacggagacatctagagacatcagtgtataatgggatcctatggcgcgatagtaatgggaagagagacataggaaggccgaagttgacatgaaaaaagagacagtaaaaggagactttaatggatgggatatacccaaatattttgttttgaacaaatggaaaatatctatccacatacctaaattttgatttgtggcttctgtaaggttttagtttgagcctacaccaacttacttgggaccaaaagactttgttgtgttgttgctgttgttgttgttgtgctgtttctcaatctctaatttgcctcattttcatacatatatcaaactcaaagtatctctacatgggaaatgcctaaattaaaagctgggcaaggcggtgcagctctacctagagcataggtggttctaggcgtcacctttctaagcaaaatatgtggacatcgatgcggttttaattaactggatatatgttaaggaaataatttgtactttgtaacattatcaataattttatctcttgaatccaatttatactaggatggattatgtttgaggatgaagatttatgttatcaatggttcacaaaggtgaaaccttgtttccatatagtttcagcggctcaactgttgtcaaacctttatgtttgttattacactttacatagcaccaggaatgagggcattctcatgggaaggcccacgttgacctaacttgtcactataaataaataactccggtgtaccctagatacttaggggaaattggtaaattggttgctgactttgttgtcctggcccgtggaatctggtttttatttttccaacgaagagcacgacctccctgtttttcctgtattgagtgaaacacaaacacagaacctaacgaagattaagtgatgaatcttcacttgttatcagacaatgtatggatattgcatattgaatattgcgttctaccttcaactaaagaatatgttctttatatataaagaactagagcatatgttttctgtattgtgtatctacaagattatcattcactaagtgtttggccctaatggtgtccttttattctactctactgtctactgtcagatatgggtgtggagagatgcgtgaacttggatggcctgacggaagcacagattgataaaaagctggaggagcttgccaaggccggcgagtctcttaaaaccaaatagttttggaactctatcctgccatgtttaacgttcccaaataaatgatgccatatgggtgagcaattgttactctatcgttatctgtagttgtgcctggaattaagtctttaattggcttaactttgtgaaataatcactactcttttacttgccatgcattttctagattacatgctatattgaaaagggaaaaaatcaatgatttgataagaagaatatatacctagtagcttgtgcatgagagattgatcgtgcaatatttctgcgcagttatatacataattgtatcacagttctatacttcagttctgcgcatgactgaaattgtgcagacacatgtacgattattatttgtttttttctatactttgatgccatgtataaagttttttttacttgtatgt

SEQ ID NO: 192 - DNA, 300 bp, Artificial Sequence
  cDNA of Zm00001d037663
atggcatggcgggcgagcctgtctcggagcctaaaggagatccgcgtcctcttctgtcagtcctccccggccagcgccgccgcccgtgagttcgtgaagaagaactatggtgacatcaaggctcgcaacccctccctccccttccttgtccgcgagtgctccggtgtccagccccagctctgggcgcgctacgatatgggtgtggagagatgcgtgaacttggatggcctgacggaagcacagattgataaaaagctggaggagcttgccaaggccggcgagtctcttaaaaccaaatag

SEQ ID NO: 193 - protein, 99 aa, Zea mays
MAWRASLSRSLKEIRVLFCQSSPASAAAREFVKKNYGDIKARNPSLPFLVRECSGVQPQLWARYDMGVERCVNLDGLTEAQIDKKLEELAKAGESLKTK

SEQ ID NO: 194 - DNA, 2208 bp, Zea mays
cttcttgcctctgcttccgcagacgccgccgcccaatcattgcctcctctgtccccttcttcctcctcctcgtctccttcctcgcctcggcctcggcctcttccacgacgacgacgaagctgctaggcagcggcaataatgccacgcggcgggtgacgttcagctcggaggagctccgcgggttgcggagcatcacggcccggcttgcgcggctcagggacgcgtccgtcaagacgatccaggcacgtacgcgttcgctccttgtccctgcgacctccaaatgcagttagtaatgaggtgttctttgcttgctgggacgacctggctggccgattctggcttgcgctttctgcagagccccgacggcgacgtcatcgactgcgtgccggcgcacctgcagccggcgttcgagcaccccaagctgaggagccagaagccagaggtaggtaaggtggcccgcccatgagcgatgacgacgagcacgcagctcgccgctcatcggtcgatcgatcggtctcttctttgtctcagctctgaaatgcgccatgcctccgcgtatacgcaacgcaggaggagcccgaagagaggccgaggagcagcgctggccgcttctccgacgctgacctggacgaggacgacgacccgttgccgcaggtgtggcggcgctccggcgagcactgcccggaggggacggtaccggtgcggcgaaccacggaggacgacgtgctcagggccaccgcctcttccgccacccggttcgggatgaaggcccgcggtgcggggctcgggttcgcgcggcgcgactccaccggcggcggccacgaggtcagtgccaatcggcgatcactcagtcaccgccgcggtgacgacggtcgccggtcaacagtcaacactccaataatttacctttggctgtgcaagcgcagtgcaagaaatttgctcatcaatggcacaccgcacacgatgaaaagtggaaatgacaccaataattgcgtgattattgttgtgtgcttgcgacttgcgagtccgatccatccggcacaggtgacagtcacggtacagggggctgcactcgcaatggccagcacatgcacatgttgtcgactcgactgcatcgttaaacaatgggagaacgtcagtacgtcactgagcagctagacggcctctgtttgcagcacgcggtggggtacgtgaccggcgggcagttctacggcgccaaggcgagcctgaacgtgtggccggcgcaggtggcgtcgccggcggagttcagcctctcgcagatctgggtcatctccggcgccttcggcaacgacctcaacaccatcgaggccggctggcaggtcagccctcagctgtacggcgacaacagccccaggttcttcacctactggacagtaagagcagctccctcgatcatccctcgtcaccattttttccggccatcaatcaagtaaaaaaatggaaacgcaacgcaggacgacgcgtaccaggagacgggctgctacaacctccactgctcgggcttcgtgcagaccagcagccgcgtggccatcggcgccgccatctcgcccgtctcctcctacgccggccgccagttcgacgtcacgcttctcatctggaaggacccgcgccggggccactggtggctgcagctcggctccggcgcgctcgtcggctactggccctccgcgctcttcacgcacctcggctcgcgcgccgacatggtgcagttcgggggcgaggtcgtcaacgcgcgccccgccggcgcgccgcacacgcccacgcagatgggctccggccgcttccccgccgagggatacgcgcgcgccgcatacttccgaaacgtgcagctcgtcgactgggacaacaacctcgtaccggccgccgggctccgcctgctcgccgaccggccggggtgctatgacatcgccggcggcagcggcggcgcgtggggcacctacttctattacggtgggcccggcaggaatgcacggtgcccgtaactttactagtatattagctaggaacggaatcgaatgcatgggatgggtgttgtacttgtacgtgtgtttcgtacgtgcgcactcaagcacacattagcagaggctgattgctatatattactccaaatgagtctgctttcactttttttaatctctccatgtgaatatgatgccgttgtgatcatctaacaatttgctcatttaa

SEQ ID NO: 195 - DNA, 1164 bp, Artificial Sequence
  cDNA of Zm00001d037668
atgcagttagtaatgaggtgttctttgcttgctgggacgacctggctggccgattctggcttgcgctttctgcagagccccgacggcgacgtcatcgactgcgtgccggcgcacctgcagccggcgttcgagcaccccaagctgaggagccagaagccagaggaggagcccgaagagaggccgaggagcagcgctggccgcttctccgacgctgacctggacgaggacgacgacccgttgccgcaggtgtggcggcgctccggcgagcactgcccggaggggacggtaccggtgcggcgaaccacggaggacgacgtgctcagggccaccgcctcttccgccacccggttcgggatgaaggcccgcggtgcggggctcgggttcgcgcggcgcgactccaccggcggcggccacgagcacgcggtggggtacgtgaccggcgggcagttctacggcgccaaggcgagcctgaacgtgtggccggcgcaggtggcgtcgccggcggagttcagcctctcgcagatctgggtcatctccggcgccttcggcaacgacctcaacaccatcgaggccggctggcaggtcagccctcagctgtacggcgacaacagccccaggttcttcacctactggacagacgacgcgtaccaggagacgggctgctacaacctccactgctcgggcttcgtgcagaccagcagccgcgtggccatcggcgccgccatctcgcccgtctcctcctacgccggccgccagttcgacgtcacgcttctcatctggaaggacccgcgccggggccactggtggctgcagctcggctccggcgcgctcgtcggctactggccctccgcgctcttcacgcacctcggctcgcgcgccgacatggtgcagttcgggggcgaggtcgtcaacgcgcgccccgccggcgcgccgcacacgcccacgcagatgggctccggccgcttccccgccgagggatacgcgcgcgccgcatacttccgaaacgtgcagctcgtcgactgggacaacaacctcgtaccggccgccgggctccgcctgctcgccgaccggccggggtgctatgacatcgccggcggcagcggcggcgcgtggggcacctacttctattacggtgggcccggcaggaatgcacggtgcccgtaa

SEQ ID NO: 196 - protein, 387 aa, Zea mays
MQLVMRCSLLAGTTWLADSGLRFLQSPDGDVIDCVPAHLQPAFEHPKLRSQKPEEEPEERPRSSAGRFSDADLDEDDDPLPQVWRRSGEHCPEGTVPVRRTTEDDVLRATASSATRFGMKARGAGLGFARRDSTGGGHEHAVGYVTGGQFYGAKASLNVWPAQVASPAEFSLSQIWVISGAFGNDLNTIEAGWQVSPQLYGDNSPRFFTYWTDDAYQETGCYNLHCSGFVQTSSRVAIGAAISPVSSYAGRQFDVTLLIWKDPRRGHWWLQLGSGALVGYWPSALFTHLGSRADMVQFGGEVVNARPAGAPHTPTQMGSGRFPAEGYARAAYFRNVQLVDWDNNLVPAAGLRLLADRPGCYDIAGGSGGAWGTYFYYGGPGRNARCP

SEQ ID NO: 197 - DNA, 3981 bp, Zea mays
atctttgtcctccctcttcccctgcaactacttcgaggcaagcatataaaaaaccttgcaccatctccatggcctctctttctctgtcttcttcctctgtttgtactagtcttgagacataagcaagaccaagatttagggggcgacaattagaagtagtacattacaattctacgggattatcgtgttcttggacacagtacttacaattcagtacaagtgctatgagtcttggcgttatgatgagtaggagaagcaaatggcgggctgtcatggcgtccgcggtgctggtgctgtgcgtgggctgtgccgtcgccgtggacgagcaggcggcggcgctgttggtgtggaaggccacgctgcggggcggcgatgcgctagccgactggaagccgaccgacgcgtcgccgtgccggtggacgggcgtgacgtgcaacgccgacgggggcgtcacggacctgagcctgcagttcgtcgacctgttcggcggcgtgccggcgaacctgaccgccctgggctccacgctgtcccggctcgtccttaccggcgcgaacctgacggggcccatcccgccggggctcggccagctaccggcgctggcgcacctcgacctcagcaacaatgcgctcacggggccaataccggcggggctgtgccggccggggagcaagctcgagacgctgtacctcaactccaaccgcctggagggcgccctgccggacgccatcggcaacctcacctctctccgggagttcatcatctacgacaaccagcttgcaggcaagataccggcggctatcggccggatggccagccttgaggtgctccgtggcggcgggaacaagaacctccacagcgcgctccctaccgagatcggcaattgctctcggctaaccatgatcggcctcgccgagaccagcatcaccgggccgctgccggcgagcctcggccggctcaagaacctcaccacgctggccatttacacggctctgctctctggcccgataccgccggagctcggccagtgcaccagcctggagaacatctacctctacgagaacgcgttgtccgggtccgtcccgtcgcagctcggcaggctcaagaggctcacgaacctgctgctgtggcagaaccagctcgtcggcatcatcccgccggagctcgggtcgtgtcccgagctcaccgtcatcgacctgtccctcaacgggctcaccggccacatcccggcctcgttcggcaaccttccgtcgctgcagcagctgcagcttagcgtgaacaagctctccggcacggtgccgcccgagctcgcccggtgcagcaatctcactgacctcgagctcgacaacaaccagttcaccggcagcatacctgccgtgctcggcggcctcccgtcgctgcgcatgctctatctgtgggccaaccagctgacgggcatgatcccgccggagctcggccggtgcacgagcctcgaggcgctcgacctgtcgaacaacgcactgactggacccatcccgcggcccctctttgcgctgccacggctttccaagctactgctcatcaacaacaacttgtccggggagttgccgccggagattggcaactgcacgtcccttgtccggttccgagtgagtggcaaccacatcaccggcgcgataccgaccgagatcggaaggcttggtaacctcagcttcctggaccttggttcgaaccggttgtccggctctctgccagcagagatatctgggtgccggaatctcacgttcgtcgacctgcacgacaacgctatttccggcgaactgccaccggagctgttccaggacttgctctctctccagtacctcgacctctcctacaacgtcatcggaggcactctcccgtcggacatcggcatgctcacctcgctgacgaagctcatcctcagcggcaatcggctgtctgggccggtaccaccggatattggttcgtgctcccggctccagctcctcgacctcggcggcaactcactttctggcaagattccggggagcataggcaagatctcggggctggagattgctcttaacctcagctgcaacagtttcaccggcacagtcccggcggagttcgctgggcttgtgaggctcggggtgctcgacatgtcgcataaccagctgtccggtgatctccagacgctgtccgcgctccagaacctcgtggccctcaacgtatccttcaacggcttcaccggtcggctgccggagacggcgttcttcgcaaagcttcccacgagcgacgtcgagggcaatccggcgctgtgcctctcccggtgcgcgggcgacgctggcgaccgcgagagcgacgcgcgccacgcggcgcgcgtggcgatggccgtgctgctgtctgccctcgtcgtgctcctcgtgtccgcggcgctcattctcgtcgggcggcactggcgcgccgcgcgcgccggcggcggggacaaggacggcgacatgtcgccgccgtggaacgtgacgctgtaccagaagctggagatcggcgtcgcggacgtggcgcgcagcctgacgcccgcgaacgtgatcggccaggggtggtccggctcggtgtaccgggcgaacctcccgtcgagcggcgtcaccgtcgccgtgaagaagttccggtcgtgcgacgaggcgtccgccgaggcgttcgcgagcgaggtgagcgtgctcccccgggtgcgccaccgcaatgtcgtccggctgctggggtgggcggccaaccgccgcacgcgcctcctgttctacgactacctcccgaacggcaccctcggcgacctgctccacggcggaggcgcggccggcaccgccgtggttgagtgggaggtgcggctcgcgatcgccgtcggtgtcgccgagggcctcgcgtacctccaccacgactgcgtgccggggatcatccaccgcgacgtcaaggccgagaacatcctccttggggagcgttacgaggcgtgcgtcgctgacttcggcctggccaggttcaccgacgagggcgccagctcgtcgcctccgccgttcgccggatcctacggctacatcgctcccggtaagccggccgtccgttgctcgcttcttccattctttagcactgagttggcctgacatttactaattatcaaatccactggtttcgtcctgatcgacgcgtgcagagtacggctgcatgaccaagatcacgacgaagagcgacgtgtacagcttcggcgtagtgctgctggagatgatcacgggtcggcggccgctggaccattcgttcggcgaggggcagagcgtggtgcagtgggtgcgcgaccacctgtgccggaagcgggagcccatggagatcattgacgcgaggctgcaggcccggccggacacgcaggtgcaggagatgctgcaggctctcggcatcgcgctgctctgcgccagcccgcgccccgaggaccggccgatgatgaaggacgtggcggcgctgctgcgtggcatccaacacgacgacagcatcgaggcgcggaaagctggaggcggagcaacagtggccgaggccggggccggagcgagaaaatggaccgacccgaagcagcccatttctccgaccaaattgatggccttagcccaaccaggccaggcccggacaagttcagggtcgcaaagcctgctcaagaacccggagtaaaatgatctgaactggctggacccactaccactgtgtggtgtacctcttggcctcttgggggaaccgtagcagagatgttggaaaatggaaagtagggaggggtgcgtcgttttgctaggtgcaaccatgtgacgttgggtacaaaatagaatcttttagaaatttattagtggtaataggggatcattctggggtcccccgagtcatgaaagtctaactaataatgttctgtaccataaatccggcaaagtgcaatggagtttagtgtaaaatattattatataattgataataatgcttatgtgg

SEQ ID NO: 198 - DNA, 3345 bp, Artificial Sequence
  cDNA of Zm00001d037672
atgagtcttggcgttatgatgagtaggagaagcaaatggcgggctgtcatggcgtccgcggtgctggtgctgtgcgtgggctgtgccgtcgccgtggacgagcaggcggcggcgctgttggtgtggaaggccacgctgcggggcggcgatgcgctagccgactggaagccgaccgacgcgtcgccgtgccggtggacgggcgtgacgtgcaacgccgacgggggcgtcacggacctgagcctgcagttcgtcgacctgttcggcggcgtgccggcgaacctgaccgccctgggctccacgctgtcccggctcgtccttaccggcgcgaacctgacggggcccatcccgccggggctcggccagctaccggcgctggcgcacctcgacctcagcaacaatgcgctcacggggccaataccggcggggctgtgccggccggggagcaagctcgagacgctgtacctcaactccaaccgcctggagggcgccctgccggacgccatcggcaacctcacctctctccgggagttcatcatctacgacaaccagcttgcaggcaagataccggcggctatcggccggatggccagccttgaggtgctccgtggcggcgggaacaagaacctccacagcgcgctccctaccgagatcggcaattgctctcggctaaccatgatcggcctcgccgagaccagcatcaccgggccgctgccggcgagcctcggccggctcaagaacctcaccacgctggccatttacacggctctgctctctggcccgataccgccggagctcggccagtgcaccagcctggagaacatctacctctacgagaacgcgttgtccgggtccgtcccgtcgcagctcggcaggctcaagaggctcacgaacctgctgctgtggcagaaccagctcgtcggcatcatcccgccggagctcgggtcgtgtcccgagctcaccgtcatcgacctgtccctcaacgggctcaccggccacatcccggcctcgttcggcaaccttccgtcgctgcagcagctgcagcttagcgtgaacaagctctccggcacggtgccgcccgagctcgcccggtgcagcaatctcactgacctcgagctcgacaacaaccagttcaccggcagcatacctgccgtgctcggcggcctcccgtcgctgcgcatgctctatctgtgggccaaccagctgacgggcatgatcccgccggagctcggccggtgcacgagcctcgaggcgctcgacctgtcgaacaacgcactgactggacccatcccgcggcccctctttgcgctgccacggctttccaagctactgctcatcaacaacaacttgtccggggagttgccgccggagattggcaactgcacgtcccttgtccggttccgagtgagtggcaaccacatcaccggcgcgataccgaccgagatcggaaggcttggtaacctcagcttcctggaccttggttcgaaccggttgtccggctctctgccagcagagatatctgggtgccggaatctcacgttcgtcgacctgcacgacaacgctatttccggcgaactgccaccggagctgttccaggacttgctctctctccagtacctcgacctctcctacaacgtcatcggaggcactctcccgtcggacatcggcatgctcacctcgctgacgaagctcatcctcagcggcaatcggctgtctgggccggtaccaccggatattggttcgtgctcccggctccagctcctcgacctcggcggcaactcactttctggcaagattccggggagcataggcaagatctcggggctggagattgctcttaacctcagctgcaacagtttcaccggcacagtcccggcggagttcgctgggcttgtgaggctcggggtgctcgacatgtcgcataaccagctgtccggtgatctccagacgctgtccgcgctccagaacctcgtggccctcaacgtatccttcaacggcttcaccggtcggctgccggagacggcgttcttcgcaaagcttcccacgagcgacgtcgagggcaatccggcgctgtgcctctcccggtgcgcgggcgacgctggcgaccgcgagagcgacgcgcgccacgcggcgcgcgtggcgatggccgtgctgctgtctgccctcgtcgtgctcctcgtgtccgcggcgctcattctcgtcgggcggcactggcgcgccgcgcgcgccggcggcggggacaaggacggcgacatgtcgccgccgtggaacgtgacgctgtaccagaagctggagatcggcgtcgcggacgtggcgcgcagcctgacgcccgcgaacgtgatcggccaggggtggtccggctcggtgtaccgggcgaacctcccgtcgagcggcgtcaccgtcgccgtgaagaagttccggtcgtgcgacgaggcgtccgccgaggcgttcgcgagcgaggtgagcgtgctcccccgggtgcgccaccgcaatgtcgtccggctgctggggtgggcggccaaccgccgcacgcgcctcctgttctacgactacctcccgaacggcaccctcggcgacctgctccacggcggaggcgcggccggcaccgccgtggttgagtgggaggtgcggctcgcgatcgccgtcggtgtcgccgagggcctcgcgtacctccaccacgactgcgtgccggggatcatccaccgcgacgtcaaggccgagaacatcctccttggggagcgttacgaggcgtgcgtcgctgacttcggcctggccaggttcaccgacgagggcgccagctcgtcgcctccgccgttcgccggatcctacggctacatcgctcccgagtacggctgcatgaccaagatcacgacgaagagcgacgtgtacagcttcggcgtagtgctgctggagatgatcacgggtcggcggccgctggaccattcgttcggcgaggggcagagcgtggtgcagtgggtgcgcgaccacctgtgccggaagcgggagcccatggagatcattgacgcgaggctgcaggcccggccggacacgcaggtgcaggagatgctgcaggctctcggcatcgcgctgctctgcgccagcccgcgccccgaggaccggccgatgatgaaggacgtggcggcgctgctgcgtggcatccaacacgacgacagcatcgaggcgcggaaagctggaggcggagcaacagtggccgaggccggggccggagcgagaaaatggaccgacccgaagcagcccatttctccgaccaaattgatggccttagcccaaccaggccaggcccggacaagttcagggtcgcaaagcctgctcaagaacccggagtaa

SEQ ID NO: 199 - protein, 1114 aa, Zea mays
MSLGVMMSRRSKWRAVMASAVLVLCVGCAVAVDEQAAALLVWKATLRGGDALADWKPTDASPCRWTGVTCNADGGVTDLSLQFVDLFGGVPANLTALGSTLSRLVLTGANLTGPIPPGLGQLPALAHLDLSNNALTGPIPAGLCRPGSKLETLYLNSNRLEGALPDAIGNLTSLREFIIYDNQLAGKIPAAIGRMASLEVLRGGGNKNLHSALPTEIGNCSRLTMIGLAETSITGPLPASLGRLKNLTTLAIYTALLSGPIPPELGQCTSLENIYLYENALSGSVPSQLGRLKRLTNLLLWQNQLVGIIPPELGSCPELTVIDLSLNGLTGHIPASFGNLPSLQQLQLSVNKLSGTVPPELARCSNLTDLELDNNQFTGSIPAVLGGLPSLRMLYLWANQLTGMIPPELGRCTSLEALDLSNNALTGPIPRPLFALPRLSKLLLINNNLSGELPPEIGNCTSLVRFRVSGNHITGAIPTEIGRLGNLSFLDLGSNRLSGSLPAEISGCRNLTFVDLHDNAISGELPPELFQDLLSLQYLDLSYNVIGGTLPSDIGMLTSLTKLILSGNRLSGPVPPDIGSCSRLQLLDLGGNSLSGKIPGSIGKISGLEIALNLSCNSFTGTVPAEFAGLVRLGVLDMSHNQLSGDLQTLSALQNLVALNVSFNGFTGRLPETAFFAKLPTSDVEGNPALCLSRCAGDAGDRESDARHAARVAMAVLLSALVVLLVSAALILVGRHWRAARAGGGDKDGDMSPPWNVTLYQKLEIGVADVARSLTPANVIGQGWSGSVYRANLPSSGVTVAVKKFRSCDEASAEAFASEVSVLPRVRHRNVVRLLGWAANRRTRLLFYDYLPNGTLGDLLHGGGAAGTAVVEWEVRLAIAVGVAEGLAYLHHDCVPGIIHRDVKAENILLGERYEACVADFGLARFTDEGASSSPPPFAGSYGYIAPEYGCMTKITTKSDVYSFGVVLLEMITGRRPLDHSFGEGQSVVQWVRDHLCRKREPMEIIDARLQARPDTQVQEMLQALGIALLCASPRPEDRPMMKDVAALLRGIQHDDSIEARKAGGGATVAEAGAGARKWTDPKQPISPTKLMALAQPGQARTSSGSQSLLKNPE

SEQ ID NO: 200 - DNA, 3440 bp, Zea mays
atgcccggccttgtgcttgtgcaccatcgacctatccaaagttagctgcccgaaagaaacctcctcgcgtctctcgtcgtcatcaaccggcggcagcgcgccgcatgcgcacgtcaccggcccggccgcatgcgatgcgcggccaacatgtcgttgacgccagccgtggcggctttaaatccgcgggacgcctcctcctcttggctcttgttcgccagccgtacgtcgtcgtcagtgtcgtgtactcgttttcccttccaaggcacccgttgcgagggcggaggcgccgatggccggggcgggagcgggggcgctggccgggctcgcagcgtgcgcgacgctggcgtgcaacgtcgcaggcgccgtgctcttcctcctcagccaagacgacgagcggctgcggcgcgggtgtgcggcgaggttgggcgctggcggcgtcgcgtcgcagccggtggaggagtgcggggatgaagaggcgctcgcgccggacgccgtcctcaacctcgagctgtgcgtgtccgcccgttcacgtcccgcgtcgcgggcgcaaggtaactgcatctcgcacagagctgaactgaagcttggcttgcgctgcatgcagcggcgacccgacgatgtaccgggcgttctggcgggaggttggggactgcggcgccaccgtgatccgcgggtgccaggggatgagctacttctccgacgacgacgccgtgctctgctggttcctcgagccggagctggagcgcgaggtgcgccgactccaccgcatcgttggaaacgccgtcgtcgacggctaccacctcgtggtcggcaccggcgccacccagctctaccaggccgccatgtacgcgctcagttcgccggcgcgccgggaccagcccgtacccgtcgtctcgccggcgccgtactactctgtaagatcacacaacacacgccgagtgctagtattattactgtgcaatactatgatatgatctggaatatattacgcgcaaccatatattttgtgcaattataaacaatctccacttttcattctccatctttaaacattgtagctagttacactttttattctctattttaaaatattgtcaatctatgatttacaacatattgctcggttggctctcacgtggtgtcggtgtttcgaatatcgttctgctccgataattaaatttatttctgtgctccagacggtgtgtacgatagacgtaggatttatactggttcgagcaaaacgtctctacatctagtcatgagtggcttgtgctaccggtaccattgatgatcaaaattggtagtaggggttacaagcaaggcaggaaaggaaggagagtcttcaaagtctcttgttcgtggtggaggtagttacaaggtggagtcctagttaagttttggcttggcgatggggctccaaccttcagatcctcctcctattcgtgggtcttctgggcgttgtctcgtctgggtcgtccttgtgtcgtccgtccaagagaagcaacctccatgtgccctctccagacagacgtcctcctgtgcggtcgggagccgaccccccttatagactaaggaggtaggggttagcccgcggtggcttctttggaaaggatccaccggttaatggtaaaaccgagcctctttaccgtgcggttgggggccggcctcccttatagactaaggaggtaggggttagcccgcggtggcttctttggaaaggatccaccagttaatggtaaaaccgagcctctttaccatgaggtaaagtcacgtgtgcttgtggttgcctgttgtcccgtattatttattacggacgacgtagatagtgtggccccgagcaccatcacttgggctatgtcgatctctggccttcgtagcctgaaactcgacgcggcttgtcgtgttgcgcgggatccagtcgaggggtttcccttcgacacatttacttctgtccggttcgtcacactcgattctagactcggtgccgcgggattcgttaggaggcggtagacattacctatcctcttcggctgcgggctcagttaccagagacttttttctccgatgtgctcggatcgacatgtggtaagaaaaaaaaatgttaagatactgttacctcatgatttataacataaatgtattgattgcaccgcctctttaaaaaaataagtattgattgcacgatatatttcggctatcatcacgtgatgagaaaaaatggtttttttgtcctccatgccagtcctatccgccgcagacagacctcctgctgtcggacttctaccgctgggccggcgatgccaacacgttcaccggcgatgaatgcatcgagctggtctgctcgccgaacaaccccgacggcgccatccgcgaggccgtcgtgaggtccgccggcgccaaggcgatccatgacctggtgtactactggccacagtacacgcccatcaccgggcccgccgcccacgacatcatgctcttcagcgtgtccaagctcaccggccacgccggcacgaggctcgggtacgtgcgtaacaacagctgcagcatcagcttgggttgcatttgtaacaacgacggcggtggctttcttctctcctcaggtgggcgctggtgaaggaccgcgaagtggccaggaatatggtctacttcgtcgaccgcagcaccaccggcgtatgcaaggagtcgcagatgcgcgccaccgagatcctcggggtggtctccgacgcctacgaggccgtcccgccggccagggccagcggcgcggtgccccgcctcttcgacttcgcgcagcggcgcctggaggagcgctggcgcatcctgcgcgccaccgtggctgccaccggcgccttcagcctgcccgaggagacctccggctactgcaacttcgccaagcaaaccgtgacagcttgccctggtaacaatgaactggacattaaccatcgtcatgccaaggtgctctgcatgtctgaaactctggatttttctcggatctggcttgtctgtagcgttcgcgtggctgcgatgtgagaaggagggcgtcgaggactgcgccgagttgctcgccggccacaagatcgtgggtagcggcggggagcagttcggaggagacgcgcggtgcgtcaggatcaacatgctggacagggacaacgtgttcaacatgctcgtccagcgcctctcctctataaactgaacggagtgaatgcatggagtggcacagcagcctgcattgccacaaataaaatgaacccagaaggatctggtgtctttttcttttgtcagtttggtatcttgggtcctggtagagaaactttgtttcggtttgcttttgatgctttggactgaactgtgtgtcaactcagtagactgttatggattcaggaataaaataagagagagaagggtttctgtgctagaatcaataccatgaactattcagctat

SEQ ID NO: 201 - DNA, 1308 bp, Artificial Sequence
  cDNA of Zm00001d037674
atggccggggcgggagcgggggcgctggccgggctcgcagcgtgcgcgacgctggcgtgcaacgtcgcaggcgccgtgctcttcctcctcagccaagacgacgagcggctgcggcgcgggtgtgcggcgaggttgggcgctggcggcgtcgcgtcgcagccggtggaggagtgcggggatgaagaggcgctcgcgccggacgccgtcctcaacctcgagctcggcgacccgacgatgtaccgggcgttctggcgggaggttggggactgcggcgccaccgtgatccgcgggtgccaggggatgagctacttctccgacgacgacgccgtgctctgctggttcctcgagccggagctggagcgcgaggtgcgccgactccaccgcatcgttggaaacgccgtcgtcgacggctaccacctcgtggtcggcaccggcgccacccagctctaccaggccgccatgtacgcgctcagttcgccggcgcgccgggaccagcccgtacccgtcgtctcgccggcgccgtactactcttcctatccgccgcagacagacctcctgctgtcggacttctaccgctgggccggcgatgccaacacgttcaccggcgatgaatgcatcgagctggtctgctcgccgaacaaccccgacggcgccatccgcgaggccgtcgtgaggtccgccggcgccaaggcgatccatgacctggtgtactactggccacagtacacgcccatcaccgggcccgccgcccacgacatcatgctcttcagcgtgtccaagctcaccggccacgccggcacgaggctcgggtgggcgctggtgaaggaccgcgaagtggccaggaatatggtctacttcgtcgaccgcagcaccaccggcgtatgcaaggagtcgcagatgcgcgccaccgagatcctcggggtggtctccgacgcctacgaggccgtcccgccggccagggccagcggcgcggtgccccgcctcttcgacttcgcgcagcggcgcctggaggagcgctggcgcatcctgcgcgccaccgtggctgccaccggcgccttcagcctgcccgaggagacctccggctactgcaacttcgccaagcaaaccgtgacagcttgccctgcgttcgcgtggctgcgatgtgagaaggagggcgtcgaggactgcgccgagttgctcgccggccacaagatcgtgggtagcggcggggagcagttcggaggagacgcgcggtgcgtcaggatcaacatgctggacagggacaacgtgttcaacatgctcgtccagcgcctctcctctataaactga

SEQ ID NO: 202 - protein, 435 aa, Zea mays
MAGAGAGALAGLAACATLACNVAGAVLFLLSQDDERLRRGCAARLGAGGVASQPVEECGDEEALAPDAVLNLELGDPTMYRAFWREVGDCGATVIRGCQGMSYFSDDDAVLCWFLEPELEREVRRLHRIVGNAVVDGYHLVVGTGATQLYQAAMYALSSPARRDQPVPVVSPAPYYSSYPPQTDLLLSDFYRWAGDANTFTGDECIELVCSPNNPDGAIREAVVRSAGAKAIHDLVYYWPQYTPITGPAAHDIMLFSVSKLTGHAGTRLGWALVKDREVARNMVYFVDRSTTGVCKESQMRATEILGVVSDAYEAVPPARASGAVPRLFDFAQRRLEERWRILRATVAATGAFSLPEETSGYCNFAKQTVTACPAFAWLRCEKEGVEDCAELLAGHKIVGSGGEQFGGDARCVRINMLDRDNVFNMLVQRLSSIN

SEQ ID NO: 203 - DNA, 4454 bp, Zea mays
gagccgggttctcaccaattcgtcttcttccacaaactccaaaaccctagcgccgccgccgccatgtcctcgtctccgtccccggcgaaccgccgtccccggggcccgcttgcgctggggctggagtcctcggcgaacaagatcggcatcggcgtggtctccctctcgggtgacatcctctccaacccgcgccacacctacgtgacaccgccgggtcatggattccttccccgggagaccgcgcagcaccacctcgcgcacctcctccctctcctccgcgccgcgctcgctgagtccggtgtggcccccgctgacctcgcatgcgtctgctacactaaaggccccggcatgggcggccctctccaggtcgccgccgcagccgcccgcgcgctctccctgttatggaggaagcctctcgtggcggtcaaccactgcgttgcgcacatcgagatgggccgcgcggtcactggggccgtggaccccgttgtactctacgtctccggcggaaacacgcaggttatcgcctacagcgaggggaggtacaggatcttcggggaaacgattgatattgccgtcgggaactgccttgaccgattcgccagggtcctagagctctccaatgaccctagccccgggtataacatcgagcaggtaaactgttccatcaaatgccaattttgttatccaattgctgttgcttaatgttgtttaattctagcgatatgcacatagatgctggtttgtgtgagtgtttttctagcatgaagtattgtcaccatgacgactgcatcacatacatgtaaatgccctgggtggcaaattgttagggaaatggtaaaagttattagtgcaccatgagtattttatcatgaaagggtgtttatgagtcctggagctatcagtggaactttggcacctcttgaactttttactgaccctagccacttgaatttaattgaaaaattaacctacattacgaaattcataggcaatttaatttatgctggctgtacatttagtggctagtttgttgcctccatcaaataatggagtgttgtacttgtgggcaagattacttttatactccctccgttccaaaatagtagtcgttttagctcttgatttttatgtctatattcaaatggatgaagatgaatctaggcacaaatataaaacgcaaacatcgactcatcaagtattgtgtgaatccaataaatctctaaaacgaattttattttgggacagagggagcatgttttgttgaaacatagcgatcatttgattatatttatgtattgaactatataatatgctgggcagatcttatgtaggactagttttgtgtgacattgcttgcataatgaaggtcaccatagatttattcagtctatgcaatcacttatgtttccttgttttcttttaaactaacacatttaggtagccaaacactatcttactcttattttgccaactcatacaatcagccaacagaacttatctttttacatacagctgaagaacatttattgtatcacggccaggtcaaatgtatccaatgggttgtttggtcgtttaagcactttgaccagtatggggtcataattagcttcattctatatatgttcctttttctcaaacctttattcgaatattgagactaaatttagctgactgtctgaagtagggctgcatgtgttgaatggtgtttggttggctgtatgtgctaaattatttgagtggtcgtgtagatggatggacaataagcttttgagccctggaagccttcacattttatccctggatacatagggcttgagcttataggataatcccaggaagtccccatttgattggcctatgttaagattgaacttcgacactattattaacattgttgacactatggattagtctgtgtgaatcattcaagagagtacttctgaagtagttccacatggtattgttatctaccattctaccttcatcattgtattagctgtcaccattagcatttttctttctttcttttttgttttgtttttgaagacattttcactttgaagcttgaacagatttatgtttttgtacaacatggcacattcttttctcatccttgagtttggtttcttaatttaccgtatttattttccttgtccagcttgcaaagaagggagaaaaattcattgatgtcccttatgttgtgaagggtatggatgtgtcattcagtggcatattgagctttattgaagctgcggcgattgaaaagcttaaaaataatgagtgcacacctgcggacctatgctactcattgcaggtacttgcatgctcttaaactttccccccttgtggataataattggttatgctttcttgacagtgacactgatgaaagtcctaatttctcaggaaactatctttgccatgcttgtcgaaattactgaacgtgccatggcacactgtgattcaaaggacgttcttattgttggtggcgtcggttgcaacgaacgtttacaggagatgatgaagattatgtgctcagaaagagggggtaggctgtttgcaactgatgaccgctattgtatagacaatggggcaatgattgcatatactggtttactggcgtatgcacatggcatgaccactccccttgaggagtcgacatttacacaaagattccgaactgatgaagttcatgcaatttggagagagaaggagatgccggtgctaaataatacccattcagatgcaattgctgaagtttctaaagatgaagcctccatggcaacaccaatcgttatagattactgaggtacaattggcctttacaattttgtcttgctgctaatgttttttcatgatagctaatgcaatttggattgttggagacaatcgctaccaattactctccctctattccaaactaagacattttgctttactagatgcatagtgtttgctatggccctgtttggaacctctagagctaatactgctaaaattagttgtataggtcaaacacccacaactaatatcccaattaattgttagctaactcacagctaacaattagttcattagctgactcaacccagctatcaatttgttagctagctaactaatatctctaggggttccaaacaggaacctatgtacttaggtgtacactatgtctggatatatatagttaaggcaatgtatctagaaaacccaaaaaatgtgtcataatttgaaatggaaggagtacttggcaattcatgtggagttgtggatgatacgatgttgggtgtgatcccacttttcgtgcgtttgatttttctacatgatgaatatgctctacaaatgaagttttctagtgcatgagttttacctagtgtgcaaaccatgctgttaaatgcaaaactatgcatctttttttggacaatacgaaacagaaggaaccactatagattttttatgcttcactgcatatcctcatgtgttttacttctgagcagccgcaatctgatgaggttgtttcttttctgtcagacagtaaagagtaaatgcttgtacggtaaagcctagaaccactcctaaggctatctccaactgatctcctatagtcctatctcatctcctatctcaaacttcactctacaaacagatagttccacatctaaatgtgatatctttgctctgtttgggagaagcctcctccaggcacatggcaggggctcagaatagttgtgctgttgtatgaactgcagcaggtaaaatgaacatgtcgtatgcctgacatacctgaagatagctgacatggatcaaacctcaccaatcgctgacatggatcaaacctcacctatcaccttaacattctagttagttacttcatcgagtgaacttattattgttgtaaactaatagacgcatttctgcaaagctagcttaactcttaagttactcttgtgatggtaatctgttaaggttctaaagcagcctcttttggatcgacattggattcttgggaacgtggggagttatttcgattcgcatccaatgcacatcagctaaggtggtggttttctgtaaaatatatacattggattattatgtgggtgttttgttttgcgagaaaaaactactacgcttgtgttggatgcgaattgaatgtctctaaatgtctgggtgcacaggttgatgcacaagatatgttgtcttataaaccccaccccaactaacgtgtatagattgcattatccagaagcgaatgtccttggaatgtggacaatggttttgttatggtcttattacctttcatgacgctacgcagatcatggacactggatacacttcttgatgcaaatctgattcggcaaggatagatcttgttcgtaggtgtgttgtacgttgtctacggatcgggtgtcattcatgtaagacagacatgcgactggtaacgggccgttaatattttg

SEQ ID NO: 204 - DNA, 1146 bp, Artificial Sequence
  cDNA of Zm00001d037675
atgtcctcgtctccgtccccggcgaaccgccgtccccggggcccgcttgcgctggggctggagtcctcggcgaacaagatcggcatcggcgtggtctccctctcgggtgacatcctctccaacccgcgccacacctacgtgacaccgccgggtcatggattccttccccgggagaccgcgcagcaccacctcgcgcacctcctccctctcctccgcgccgcgctcgctgagtccggtgtggcccccgctgacctcgcatgcgtctgctacactaaaggccccggcatgggcggccctctccaggtcgccgccgcagccgcccgcgcgctctccctgttatggaggaagcctctcgtggcggtcaaccactgcgttgcgcacatcgagatgggccgcgcggtcactggggccgtggaccccgttgtactctacgtctccggcggaaacacgcaggttatcgcctacagcgaggggaggtacaggatcttcggggaaacgattgatattgccgtcgggaactgccttgaccgattcgccagggtcctagagctctccaatgaccctagccccgggtataacatcgagcagcttgcaaagaagggagaaaaattcattgatgtcccttatgttgtgaagggtatggatgtgtcattcagtggcatattgagctttattgaagctgcggcgattgaaaagcttaaaaataatgagtgcacacctgcggacctatgctactcattgcaggaaactatctttgccatgcttgtcgaaattactgaacgtgccatggcacactgtgattcaaaggacgttcttattgttggtggcgtcggttgcaacgaacgtttacaggagatgatgaagattatgtgctcagaaagagggggtaggctgtttgcaactgatgaccgctattgtatagacaatggggcaatgattgcatatactggtttactggcgtatgcacatggcatgaccactccccttgaggagtcgacatttacacaaagattccgaactgatgaagttcatgcaatttggagagagaaggagatgccggtgctaaataatacccattcagatgcaattgctgaagtttctaaagatgaagcctccatggcaacaccaatcgttatagattactga

SEQ ID NO: 205 - protein, 381 aa, Zea mays
MSSSPSPANRRPRGPLALGLESSANKIGIGVVSLSGDILSNPRHTYVTPPGHGFLPRETAQHHLAHLLPLLRAALAESGVAPADLACVCYTKGPGMGGPLQVAAAAARALSLLWRKPLVAVNHCVAHIEMGRAVTGAVDPVVLYVSGGNTQVIAYSEGRYRIFGETIDIAVGNCLDRFARVLELSNDPSPGYNIEQLAKKGEKFIDVPYVVKGMDVSFSGILSFIEAAAIEKLKNNECTPADLCYSLQETIFAMLVEITERAMAHCDSKDVLIVGGVGCNERLQEMMKIMCSERGGRLFATDDRYCIDNGAMIAYTGLLAYAHGMTTPLEESTFTQRFRTDEVHAIWREKEMPVLNNTHSDAIAEVSKDEASMATPIVIDY

SEQ ID NO: 206 - DNA, 432 bp, Zea mays
atggggcaagcctcccaggtcgagccccctatcggagcggccgtcatgccgggggaggttgttgacgcggccgcggccccgagtccgccagtctcattgtcggcgccggcatcgactcctgctggggccgctgttgatccctccacggagccacccgccaccgctgatgttgagatggctgaggcgcctccgctctcgatcatccccgatctccccattttcgaccatgaggaaggggcggccgttgttgccgaggtcggcgagcggaggcctgtcaccttggccgaggagaggcccgatacgtcgactgcggcggcacccgatgcattgactgcagggggacctggcgcctcggtcgcggggcacgcagaactgtggcctgtcttggggagcagcggcgttatccccatgcagcccaatcccaatgagtga

SEQ ID NO: 207 - DNA, 432 bp, Artificial Sequence; identical to SEQ ID NO: 206
  cDNA of AGP9L

SEQ ID NO: 208 - protein, 143 aa, Zea mays
MGQASQVEPPIGAAVMPGEVVDAAAAPSPPVSLSAPASTPAGAAVDPSTEPPATADVEMAEAPPLSIIPDLPIFDHEEGAAVVAEVGERRPVTLAEERPDTSTAAAPDALTAGGPGASVAGHAELWPVLGSSGVIPMQPNPNE

SEQ ID NO: 209 - DNA, 2399 bp, Zea mays
atgactctctgccgcgctcctcaaaaccatacgatgcgtgtggcagcagtagcagcgctgcacctgctgcatctcctggccgccgcaccagcgctccacgcagccagcagcgtaacatctccaggttgcctcagcgagtgcggcgaggtcagtataccttacccgttcggtgtcggcgccggctgctacgccgaggggttccagctcacctgcgacgagacccacgacgccccaaagctcctgttgggcaacactagtgtggtggtgctcaacatctctctgcacgacgggagcctgcagatcgacaacggcgtcgtcagtgtgacggggagaagcctgtacagcatggactgggggatccccctcggcggcaacggcatcttcacgctgtcctcgttctggaacagcttcttcgtcatggggtgcgggttcaggttcctggtcaggcagccgggcgcggacaacatgatcgtcgtgtgccgttcgccgtgcctgagcgggcgtcccgcggtagccaccgacggcacctgctcgggtgctggatgctgcgaggcgtccttgcccggatcgagcagcatgtactcgatcaagctcgaatctctggacggcaccgcgacggaggaggagcagccgttcaacgccacgtttgtcatcgcggataaggagtggtggatcacaggcaaccacggtatgcttctgcaggaggccgtctcggatggccagctgggcgtgtcgtctggctccgctcttccgctgcagatcaaggctggtggcaagtggaactttggaaacctgtcttgtgcggacgctccgaggtcaagtggctatgggtgccttagctccaacagctactgccatgatcactggaacggcgaatcgtctgggtacatatgccgctgcagtgacggctacgagggcaacccttacataagaaatggatgcaaaggtatgcaacttgtcatcactgaaatataagagagaagagttccagttccagttccaattcttctcacagcagctagctaacatgctgcttcacaactgtgttttgcattgcagcaaatgttgacgagtgcacaatccgagacaagtaccagtgcttcggtgactgcattaacgtggatggatcctataagtgcgtctgtccacttggcacctctggaaaccccatggaaccacatggatgcatccaagatacagagaagttctcaggtaacacaggtaacaacgtcttccaacaacctgtagcttcacaactgtctgtgacaatgttatcttttgtggggaaaaaaagcactacttgaaacatatctgaatgattgaatccatatacttttttttcaggattagctgttgccacagggatttgctgtggcgggtgccttgttcttctcatcttcgctgccatcctcctgaggcaaaagctaagagcccggaaagccaagaagctgaggaacttttacttcaggaagaaccgtgggttgctgctgcaacaactggtagacaaggacattgctgaaaggatgatcttcagcctggaagagctagagaaggcaacagatacgttcaacgtggatcgcaagatcggcaagggaggccatggtaccgtctacaagggcattctgtccgaccaacgcgtcgtagccattaaaatgtcaagacgagcggtgcagagcgagactgacaacttcataaacgaggtcgccattctttcccaggtgaaccacaggaacgtggtaaagctcttcggatgctgcctggagacagaggtcccactactagtgtacgagttcatctcgaatggaacccttcatgagcaccttcatgtcagctcttcgcagtcgttgccatggagggaacggctgaggatcgcacttgaagtcgcgcgatctcttgcgtatctacactctgctgcttccctgtcaatagttcacagggacatcaaggctaccaatattctgcttgacgacaatctaacggcgaaggtgtcggactttggagcttctcgtggcatccctattgacgacaatctaacggcaggcgacagtctagtggagcagttcctgatactacagaggcaagacaagttcgctgagatattagacccgcaggttgccaaggaaggggaggaagaagcccgagtagtggccgagatcgcagcgatgtgtgtcagctcaagcggggacgataggcccaccatgaagcaagtcgagatgggactcgaggtgctgcaaagcgcagcgaccagcgttaagaacactccgagaactgaggagcacgtcgtggacattccttcagctgggcgccgacagagtggcggtactactgacgggaagaacatcagcaggcggtttagtatggaaagggaggtcttgttgtccatggatttcccacgctaa

SEQ ID NO: 210 - DNA, 2121 bp, Artificial Sequence
  cDNA of Zm00001d037635 - NC262A genotype
gtggcagcagtagcagcgctgcacctgctgcatctcctggccgccgcaccagcgctccacgcagccagcagcgtaacatctccaggttgcctcagcgagtgcggcgaggtcagtataccttacccgttcggtgtcggcgccggctgctacgccgaggggttccagctcacctgcgacgagacccacgacgccccaaagctcctgttgggcaacactagtgtggtggtgctcaacatctctctgcacgacgggagcctgcagatcgacaacggcgtcgtcagtgtgacggggagaagcctgtacagcatggactgggggatccccctcggcggcaacggcatcttcacgctgtcctcgttctggaacagcttcttcgtcatggggtgcgggttcaggttcctggtcaggcagccgggcgcggacaacatgatcgtcgtgtgccgttcgccgtgcctgagcgggcgtcccgcggtagccaccgacggcacctgctcgggtgctggatgctgcgaggcgtccttgcccggatcgagcagcatgtactcgatcaagctcgaatctctggacggcaccgcgacggaggaggagcagccgttcaacgccacgtttgtcatcgcggataaggagtggtggatcacaggcaaccacggtatgcttctgcaggaggccgtctcggatggccagctgggcgtgtcgtctggctccgctcttccgctgcagatcaaggctggtggcaagtggaactttggaaacctgtcttgtgcggacgctccgaggtcaagtggctatgggtgccttagctccaacagctactgccatgatcactggaacggcgaatcgtctgggtacatatgccgctgcagtgacggctacgagggcaacccttacataagaaatggatgcaaagcaaatgttgacgagtgcacaatccgagacaagtaccagtgcttcggtgactgcattaacgtggatggatcctataagtgcgtctgtccacttggcacctctggaaaccccatggaaccacatggatgcatccaagatacagagaagttctcaggtaacacaggattagctgttgccacagggatttgctgtggcgggtgccttgttcttctcatcttcgctgccatcctcctgaggcaaaagctaagagcccggaaagccaagaagctgaggaacttttacttcaggaagaaccgtgggttgctgctgcaacaactggtagacaaggacattgctgaaaggatgatcttcagcctggaagagctagagaaggcaacagatacgttcaacgtggatcgcaagatcggcaagggaggccatggtaccgtctacaagggcattctgtccgaccaacgcgtcgtagccattaaaatgtcaagacgagcggtgcagagcgagactgacaacttcataaacgaggtcgccattctttcccaggtgaaccacaggaacgtggtaaagctcttcggatgctgcctggagacagaggtcccactactagtgtacgagttcatctcgaatggaacccttcatgagcaccttcatgtcagctcttcgcagtcgttgccatggagggaacggctgaggatcgcacttgaagtcgcgcgatctcttgcgtatctacactctgctgcttccctgtcaatagttcacagggacatcaaggctaccaatattctgcttgacgacaatctaacggcgaaggtgtcggactttggagcttctcgtggcatccctattgacgacaatctaacggcaggcgacagtctagtggagcagttcctgatactacagaggcaagacaagttcgctgagatattagacccgcaggttgccaaggaaggggaggaagaagcccgagtagtggccgagatcgcagcgatgtgtgtcagctcaagcggggacgataggcccaccatgaagcaagtcgagatgggactcgaggtgctgcaaagcgcagcgaccagcgttaagaacactccgagaactgaggagcacgtcgtggacattccttcagctgggcgccgacagagtggcggtactactgacgggaagaacatcagcaggcggtttagtatggaaagggaggtcttgttgtccatggatttcccacgc

SEQ ID NO: 211 - protein, 707 aa, Zea mays
VAAVAALHLLHLLAAAPALHAASSVTSPGCLSECGEVSIPYPFGVGAGCYAEGFQLTCDETHDAPKLLLGNTSVVVLNISLHDGSLQIDNGVVSVTGRSLYSMDWGIPLGGNGIFTLSSFWNSFFVMGCGFRFLVRQPGADNMIVVCRSPCLSGRPAVATDGTCSGAGCCEASLPGSSSMYSIKLESLDGTATEEEQPFNATFVIADKEWWITGNHGMLLQEAVSDGQLGVSSGSALPLQIKAGGKWNFGNLSCADAPRSSGYGCLSSNSYCHDHWNGESSGYICRCSDGYEGNPYIRNGCKANVDECTIRDKYQCFGDCINVDGSYKCVCPLGTSGNPMEPHGCIQDTEKFSGNTGLAVATGICCGGCLVLLIFAAILLRQKLRARKAKKLRNFYFRKNRGLLLQQLVDKDIAERMIFSLEELEKATDTFNVDRKIGKGGHGTVYKGILSDQRVVAIKMSRRAVQSETDNFINEVAILSQVNHRNVVKLFGCCLETEVPLLVYEFISNGTLHEHLHVSSSQSLPWRERLRIALEVARSLAYLHSAASLSIVHRDIKATNILLDDNLTAKVSDFGASRGIPIDDNLTAGDSLVEQFLILQRQDKFAEILDPQVAKEGEEEARVVAEIAAMCVSSSGDDRPTMKQVEMGLEVLQSAATSVKNTPRTEEHVVDIPSAGRRQSGGTTDGKNISRRFSMEREVLLSMDFPR

SEQ ID NO: 212 - DNA, 5760 bp, Zea mays
atggcggccaacaaggggatggtggcaggctctcacaaccgcaacgagttcgtcatgatccgccacgacggcgacgcgcctgtcccggtacgttcaccaaacccaatgccaccctcgctgctaccttcagattctgttcctgccagtggatctgggattctagaccgaggtgtcagttttagtgtaacgctcggggttcgcccgccaattgcggtcgcttctccgtgtctctactcgtagatttcgcctgcccatttcagcgttgcttccctaagccaccgatcggacgtgtcctcctgccgattcctgaattgttcgtgctcggtccaattcttcgaacagttgccaaatcggcaattggtaatgccagacacgtttctctgtatcggagatccagtgaaatggagcctcggattgtttagatccctgtgtttactcatgcctgaacaattccttatcataattaccatggcaccgatggtgaattagatccttctttgccctgctgcagcttgcctttgtgactaccgcaccattgaattagttcatattatgtaacttctaaattaccttttgtaatattttgatcttaatgtctcgacttgaagactagtagacacttggctgatttttcagtctgtcactcactagtgaagtgcatggatggctgacatgtcttctaattattgtttgcatgtgtgctgattttgttgttatctcgctgatgcaggctaagcccacgaagagtgcgaatgggcaggtctgccagatttgtggcgacactgttggcgtttcagccactggtgatgtctttgttgcctgcaatgagtgtgccttccctgtctgccgcccttgctatgagtacgagcgcaaggaagggaaccaatgctgcccccagtgcaagactagatacaagagacagaaaggttggtttccttgcatcttctttcggtgtgtgtaacttgtaggatgttagcatgaggaagtctacatcatgtgcttactttatgtaaataaaggttgcagtgtaatgggcatcccttatgatgttgacatttgacaatctagattcagcctttgaatccgtttcattctcaataacaatagttaacgaattcttctgacttcctctctaatgaaattcaggtagccctcgagttcatggtgatgatgaggaggaagatgttgatgacctggacaatgaattcaactataagcaaggcaatgggaaaggcccagagtggcagcttcaaggagatgacgctgatctgtcttcatctgctcgccatgatccacaccatcggattccacgccttacaagtggacaacaggtacaatatatgtcagtcatgttcatttatcgatctgagccttgattctgtggtgcaatgtttgatagtgtgcaccagtgcatttttgttactgtacttatttctatatgaatatgtgctctcacaaactaacataccgatatttatcttcagatatctggagagatccctgatgcatcccctgaccgtcattctatccgcagtccaacatcgagctatgttgatccaagcgttccaggtattctatcgaacatcgtaaattgctttgtgtggagaatttgctgcatattagctggggatcattaatatttttttttactatgatttcagttcctgtgaggattgtggacccctcgaaggacttgaattcctatgggcttaatagtgttgactggaaggaaagagttgagagctggagggttaaacaggacaaaaatatgttgcaagtgactaataaatatccagaggctagaggagacatggaggggactggctcaaatggagaagatatgcaaatgtataccaccttcccttgcctatgatatcatacatgcctccttatagtgcattagatttaggtctgcatgatatacatgctgtatctgggaacttgtgttgctttcggatgaactagtcggggtatgttatatgagggtacactgaagaggactcacaagggcattaaactacccattcacagttaatcaatgactaagataattttgcatttcctagtagatgaaggtctatttcctatgcttccttagctaacccttactaatagtgcacacattcatttattgtagattttgcttcaaagaaattgagttctctgtaactttttctttatcgcagggttgatgatgcacgcctacctttgagccgcattgtgccaatttcctcaaaccagctcaacctttaccggatagtaatcattctccgtcttatcatcctgtgcttcttcttccaatatcgtatcagtcatccagtgcgtaatgcttatggattgtggctagtatctgttatctgtgaggtctggtttgccttgtcctggcttctagatcagttcccaaaatggtatccaatcaaccgtgagacatatctcgacaggcttgcattgaggtaagctacaacattgcacacatttctttgagattttgtttgctgaaatgtttttttgtgttgatatacctaaatgttgcaggtatgatagagagggagaaccatcacagctggctcccattgatgtctttgtcagtacagtggatccattgaaggaacctccactgatcacagccaacactgttttgtccattcttgctgtggattaccctgttgacaaagtgtcatgctatgtttctgatgatggctcagctatgctgacttttgagtctctctctgaaactgccgaatttgctagaaagtgggttcccttttgtaagaagcacaatattgaaccaagagctccagaattttactttgctcaaaaaatagattacctgaaggacaaaattcaaccttcatttgttaaggaaagacgagcaatgaaggtaaactactacctcatggttacatcaccattgctctaccttgttttaactttggatatgcttttttcagagagagtatgaagaattcaaaataagaatcaatgcccttgttgccaaagcacagaaagtgcctgaagaggggtggaccatggctgatggaactgcttggcctgggaataaccctagggaccatcctggcatgattcaggtgcccaaccgcccattgcttcaactgaagcttctttagaaacttggatgtaatctggttcttatgtctttttctatgtgaaatcaggtgttcttggggcacagtggtgggcttgacactgatggaaatgaattaccacgtcttgtctatgtctctcgtgaaaagagaccaggctttcagcatcacaagaaggctggtgcaatgaatgcactggtatgcttttctctccatgaattcacttctacaccaggcacttgattcatctgttcctttctaattataccctttcactggtgggcagattcgtgtatctgctgtgctgacaaatggtgcctatcttctcaatgtggattgtgaccattacttcaatagcagcaaagctcttagagaagcaatgtgcttcatgatggatccagctctaggaaggaaaacttgttatgtacaatttccacaaagatttgacggcattgacttgcacgatcgatatgctaatcggaacatagtcttctttgatgtaagtattgtggactgatggttcttctgtaatccacaacaaaatatttatggctcacatggtatttgttttgcagatcaacatgaaaggtctagatggcattcagggtccagtctatgtgggaacaggatgctgtttcaataggcaggctttgtatggatatgatcctgttttgactgaagctgatctggaacctaacattgttgttaagagctgctgtggtagaaggaagagaaagaacaagagttatatggatagtcaaagccgtattatgaagagaacagaatcttcagctcccatcttcaacatggaagacatcgaggagggtattgaaggtgtgttcttgctgttttgcatttcttaccttactttttattcttagagatctgagaacaatcgctgcttttattgcaatatcaaacatgattctcttagtctgatttttggacataaaaaagcaaaacaatctttaccttctcaagttggctggctcctgctgatctcacttttggaatcccattaggttatgaggatgaaaggtcagtgcttatgtcccagaggaaattggagaaacgctttggtcagtctccaatcttcattgcatccacctttatgactcaaggtggcataccaccttcaacaaacccagcttctctactgaaggaagctatccatgttatcagctgtgggtacgaggacaaaactgaatggggaaaagaggtttgtgtggcaaacatgttttccctctgattcataccatagagttctttaacttaatatcgtagcatggtatctcctttttcccgttccaggactcagattgtgattatcctttctatgtttttttttcagattggctggatctatggttcagttacagaggatattctgactgggtttaaaatgcatgcaagaggctggcaatcaatctactgcatgccaccacgaccttgtttcaagggttctgcaccaatcaatctttctgatcgtcttaatcaggtgctccgttgggctcttgggtcagtggaaattctgcttagcagacattgtcctatatggtatggctacaatgggcgattgaagcttttggagaggctggcttacattaacaccattgtttatccaatcacatctgttccgcttatcgcctattgtgtgcttcctgctatctgtcttcttaccaataaatttatcattcctgaggttagtgacaagatatccacttttccttctgttcagtatttttaggcataactctgttcttataatttctcatttgtcatatcactgctctaccatgtatacctgttatcacattgaactaacaaatagtaccaatggataagtagtagccataactagtatttgtttccccttggcatttttcttactctatagagtttattatttgaattatttcacttgtgatgttaatggacacaagcaaagtgtcttgtgcaatatgatctaagatcagcagagctgtgtttttttcctagattctgccaacctttctattgattatcacattctatttttctaatgttcataccattttgtgatgtgcagattagtaattatgctggaatgttcttcattcttcttttcgcctccattttcgccactggtatattggagctcagatggagtggtgttggcattgaagattggtggagaaatgagcagttttgggttattggtggcacctctgcccatctcttcgcggtgttccagggtctgctgaaagtgttggctgggattgataccaacttcacagttacctcaaaggcatctgatgaggatggcgactttgctgagctatatgtgttcaagtggaccagtttgctcatccctccgaccactgttcttgtcattaacctggtcggaatggtggcaggaatttcgtatgccattaacagcggctaccaatcctggggtccgctctttggaaagctgttcttctcgatctgggtgatccttcatctctaccccttcctcaagggtctcatgggcaggcagaaccgcacgccaacaatcgtcatcgtttggtccatcctccttgcatctatcttctccttactgtgggtgaagatcgatcctttcatctccccgacacagaaagctgccgccttggggcaatgtggtgtgaattgctga

SEQ ID NO: 213 - DNA, 3225 bp, Artificial Sequence
  cDNA of Cesa2 - NC262A genotype
atggcggccaacaaggggatggtggcaggctctcacaaccgcaacgagttcgtcatgatccgccacgacggcgacgcgcctgtcccggctaagcccacgaagagtgcgaatgggcaggtctgccagatttgtggcgacactgttggcgtttcagccactggtgatgtctttgttgcctgcaatgagtgtgccttccctgtctgccgcccttgctatgagtacgagcgcaaggaagggaaccaatgctgcccccagtgcaagactagatacaagagacagaaaggtagccctcgagttcatggtgatgatgaggaggaagatgttgatgacctggacaatgaattcaactataagcaaggcaatgggaaaggcccagagtggcagcttcaaggagatgacgctgatctgtcttcatctgctcgccatgatccacaccatcggattccacgccttacaagtggacaacagatatctggagagatccctgatgcatcccctgaccgtcattctatccgcagtccaacatcgagctatgttgatccaagcgttccagttcctgtgaggattgtggacccctcgaaggacttgaattcctatgggcttaatagtgttgactggaaggaaagagttgagagctggagggttaaacaggacaaaaatatgttgcaagtgactaataaatatccagaggctagaggagacatggaggggactggctcaaatggagaagatatgcaaatggttgatgatgcacgcctacctttgagccgcattgtgccaatttcctcaaaccagctcaacctttaccggatagtaatcattctccgtcttatcatcctgtgcttcttcttccaatatcgtatcagtcatccagtgcgtaatgcttatggattgtggctagtatctgttatctgtgaggtctggtttgccttgtcctggcttctagatcagttcccaaaatggtatccaatcaaccgtgagacatatctcgacaggcttgcattgaggtatgatagagagggagaaccatcacagctggctcccattgatgtctttgtcagtacagtggatccattgaaggaacctccactgatcacagccaacactgttttgtccattcttgctgtggattaccctgttgacaaagtgtcatgctatgtttctgatgatggctcagctatgctgacttttgagtctctctctgaaactgccgaatttgctagaaagtgggttcccttttgtaagaagcacaatattgaaccaagagctccagaattttactttgctcaaaaaatagattacctgaaggacaaaattcaaccttcatttgttaaggaaagacgagcaatgaagagagagtatgaagaattcaaaataagaatcaatgcccttgttgccaaagcacagaaagtgcctgaagaggggtggaccatggctgatggaactgcttggcctgggaataaccctagggaccatcctggcatgattcaggtgttcttggggcacagtggtgggcttgacactgatggaaatgaattaccacgtcttgtctatgtctctcgtgaaaagagaccaggctttcagcatcacaagaaggctggtgcaatgaatgcactgattcgtgtatctgctgtgctgacaaatggtgcctatcttctcaatgtggattgtgaccattacttcaatagcagcaaagctcttagagaagcaatgtgcttcatgatggatccagctctaggaaggaaaacttgttatgtacaatttccacaaagatttgacggcattgacttgcacgatcgatatgctaatcggaacatagtcttctttgatatcaacatgaaaggtctagatggcattcagggtccagtctatgtgggaacaggatgctgtttcaataggcaggctttgtatggatatgatcctgttttgactgaagctgatctggaacctaacattgttgttaagagctgctgtggtagaaggaagagaaagaacaagagttatatggatagtcaaagccgtattatgaagagaacagaatcttcagctcccatcttcaacatggaagacatcgaggagggtattgaaggttatgaggatgaaaggtcagtgcttatgtcccagaggaaattggagaaacgctttggtcagtctccaatcttcattgcatccacctttatgactcaaggtggcataccaccttcaacaaacccagcttctctactgaaggaagctatccatgttatcagctgtgggtacgaggacaaaactgaatggggaaaagagattggctggatctatggttcagttacagaggatattctgactgggtttaaaatgcatgcaagaggctggcaatcaatctactgcatgccaccacgaccttgtttcaagggttctgcaccaatcaatctttctgatcgtcttaatcaggtgctccgttgggctcttgggtcagtggaaattctgcttagcagacattgtcctatatggtatggctacaatgggcgattgaagcttttggagaggctggcttacattaacaccattgtttatccaatcacatctgttccgcttatcgcctattgtgtgcttcctgctatctgtcttcttaccaataaatttatcattcctgagattagtaattatgctggaatgttcttcattcttcttttcgcctccattttcgccactggtatattggagctcagatggagtggtgttggcattgaagattggtggagaaatgagcagttttgggttattggtggcacctctgcccatctcttcgcggtgttccagggtctgctgaaagtgttggctgggattgataccaacttcacagttacctcaaaggcatctgatgaggatggcgactttgctgagctatatgtgttcaagtggaccagtttgctcatccctccgaccactgttcttgtcattaacctggtcggaatggtggcaggaatttcgtatgccattaacagcggctaccaatcctggggtccgctctttggaaagctgttcttctcgatctgggtgatccttcatctctaccccttcctcaagggtctcatgggcaggcagaaccgcacgccaacaatcgtcatcgtttggtccatcctccttgcatctatcttctccttactgtgggtgaagatcgatcctttcatctccccgacacagaaagctgccgccttggggcaatgtggtgtgaattgctga

SEQ ID NO: 214 - protein, 1074 aa, Zea mays; identical to SEQ ID NO: 11

SEQ ID NO: 215 - DNA, 1848 bp, Zea mays
atgggcgggcgggccaaggttggttgctttcacccaagccacaagctgcatctcccactaggacagctagcgtgagtatgtatatcgggtaaatgattaatatatgatcctagcgatcgatttcaggttcagttgattgagttgtttctttgccccgcccgttctgccaacctggtatacccgctgtctaaaaatatactcaagctgcccgtacgtggaacggagtctgaaaatgtactcctcaactaattaaccgcgtctgtgtatgtacgtatatatgtatgtatgaaatcgtagcagtagggttccggaattagttccggaattatacagaccaattagtatagtcgatgtactactgatatatagtatactgtataatatcaattttaatttggttgggcgccaactccagattattctaatttttttgttagagattgatgatcggactacctttttacaagtactgtccagctacagagttacccttcacatgcatgcatgcgtgcgtgcacgtccttcctcgctctaggggtaggcagacagaccaatatgcaagctgttaattaggccatgttgttgttgtcttgttgatcccggccggaccacgtgcaaagggttcatatatggctgcttctcgtcgtctccttctcgcaaaaagcacatgcatgcacgtacggagtcggagacactcagacacatcagtttaggccggacggtttggacgaccgtaccgtttggttcttaattagctacaggttcctaacattagttcttcgatagcgcgagtgtgtcgtgtgtgtgtgattttctagagagggtgcatttcaatttattgttccagtaaattaaagagatttttaatagcgagactagcgacctaattagcgctgcttaacggccgctgtcatggtgctttggcaagtatatatatacatagatcacctcctgctagctaccaatcgagaaagagacaagtgcctgtactaggatccaaaaaaattaacgtgtatataaccgcgcgcatgcaattatatataatatatatagtaccacggaccgatgcgagaaaaagagcaagggacacgtcattttcgacctggccatcacggctggcttagtttggatgtgtcggattagtatatataaaccggtggtgtttatcacgttgttgcgtcctatatagtactacgtaccggcaggtggacggcaacacgatatttttcagctccatcggacgacacacaaggagctatagcttctggtgatgtgtcgtctcgtcgctcgcaataatcatcatctagctatagcagcagcgcgctctgcgttctcgtcggtaaatgataaggattcgtaccttgcttgctttgctatggggccggggcggagtaaaaaaatttctttactagacagtaaagttctggcgctaattaatataattgcgacgacatcctctgttaattagttcacatatggtgattatatttgcagtgcgagagcatggtggcggtggagcggcggctcaaggagatgggcatcccgtacgtgcagcgctgcgtggaggagggcggcatcaacgtggaccagatcttcttccacgacccggacgccttcatgatcgaggtctgcaactgcgacaacctccccgtcgtcccgctcgccgccgccgccgaccagcgcgcgcctgccgtcctcggggcctgcaagcgggccgcggcggtcgtcaagcagcagcagcagcagcagcaaagcagcggcggcgccgtgccttcttccgccccggtggcgcaggcgcccatcgtccgcgtcgccgaggagtcgtcgtcgcacatttcgtgcgcgtga

SEQ ID NO: 216 - DNA, 372 bp, Artificial Sequence
  cDNA of Zm00001d037637 - NC262A genotype
atgggcgggcgggccaagtgcgagagcatggtggcggtggagcggcggctcaaggagatgggcatcccgtacgtgcagcgctgcgtggaggagggcggcatcaacgtggaccagatcttcttccacgacccggacgccttcatgatcgaggtctgcaactgcgacaacctccccgtcgtcccgctcgccgccgccgccgaccagcgcgcgcctgccgtcctcggggcctgcaagcgggccgcggcggtcgtcaagcagcagcagcagcagcagcaaagcagcggcggcgccgtgccttcttccgccccggtggcgcaggcgcccatcgtccgcgtcgccgaggagtcgtcgtcgcacatttcgtgcgcgtga

SEQ ID NO: 217 - protein, 123 aa, Zea mays
MGGRAKCESMVAVERRLKEMGIPYVQRCVEEGGINVDQIFFHDPDAFMIEVCNCDNLPVVPLAAAADQRAPAVLGACKRAAAVVKQQQQQQQSSGGAVPSSAPVAQAPIVRVAEESSSHISCA

SEQ ID NO: 218 - DNA, 2900 bp, Zea mays
  misc_feature (699)..(710): n is a, c, g, or t
atgggcagtaagagcggcgtgcgactgcaatgcgccgaggccaaatcggcgacggattggagctgctgcttcctggccctgccaccggcagcaccatccggtgttgatggcgatggcgggtttaacctctcgtggaacctccgcaagtccttccacccgccggcgggactcttcgccagcatgggccagcaggttggggttgggttcccggggacttcttctaggtccccgtcgccggagacacctcgggatccgtacatgaagtacgtctcgccggaggttgtcgagacacctccgtcgggggaaggggtggcgttgagggacaaggggaagaagaaagccgtgaagctcaggattaaggttgtgaatcatcacctcaagaggctgatcagtggagcactcgcaggcacagtgtcaagaactgctgttgcacctttggagacgatcagaacgcatttgatggttgggagtaatgggaattcgtcgacggaggtgttccagtctatcatgaagcatgagggatggactgggttgttccgtggtaactttgttaatgtcatccgggtagccccaagcaaggcaatcgaggtaaatagctgatccacatctgttattttttttaccgtgttttcttttcaatgtacttacagtagtcacaattattcctcaccataagggcttgttcggttttaccccaannnnnnnnnnnntatggattgagggggattgagggggtttcaatccctaataagtcaaaatcccctccaatccgtatcaatccctaataagtcaaaatcccctccaatccgtatcaatcccctccgatccatatggattgaaaataaccgaacaagccctaatgtggaaatcaacccttgactacatatttgtttttttagaatatatacgtacctccttgcaaataaactgaacaatttgttggtagttacatccagtgttaatctgttgcattatttcctcatcagcaaaatcacgaaatgggtgcgggcgtgcaactgagtttgaaagaatgacttagattcagaattgacttagatacaaacaaaatgttttaaatactggaataacttagatgcaatgtataatgagttaaatattgtgagttgaaaggaatgacttagattcaatcctgcaatgcatgaatcacttagatgcaatataaaaatatcttagaaacagtgagttaaaaaatgacttagatataaataaaatgttttaaatattgtgagttggaagaaatgacttagatgtacctctgagattgccggtctgacttgttagacagtgcggactcaaaaaaagaactgttggtctgactgcaccattgagtgcaggtaatggacctttaggtgacaaatggaacacacacacacacacacacacacacacatgctatttgtcaccctaggtaaaacttcatctagccggtaatgactaaacgatgactgagcaatatgctcaagttggtcatggagagaacaacaaacttgcttgcttttggcaatgtttgggtctcataagccccatctacaggagaagctaacactgagagttctctctctgctttttaaaaaagtttcgtcaatttttaagaaagcattaagtttgatacatcattcatgctggggttaccagattacaagcaaaagtacaaaaaagagtaacaaagctccatgctgctattacaatgattcaaatttctatgatacctgagatgtttctaagcactttagagtttttcatgacctggaactatcaagaaaaatctagctttttgttattgacttatcttagtggaactcttacagttaagtacttgtaaccagagttaatgcaaacatgtttttaacttgtttctcctgagccaaggtcatatactcatataggctatcaggctaatcttgcaccatagagaccaatcgctttaggatgttgctgggtgcctgcgttgtctgataaattactggcttacagctgcatttagtatccgcacatcatggataggcattacatgcattctgattctggttaatttgtcacgatcataatggcgatatattgatggtgcttatggtatggacatgtatatgtatacagcatcaaaatatctgattgtttgttttgacttttttttgtgcagctttttgctttcgatacagctaacaagttcttgacccccaaatctggggaggaacggaagatcccagtccctccttcactagtggctggggcatttgcaggtgttagctcaacactgtgtacataccctctggaattgattaagacacggttaactatacaggtcagtgctaaccacaagacatatctttcataaatccggtagagtgggccttcatactaaagtacaaaacatgagaggctgtaatggttgctctctgattctgcagagaggggtgtatgacaatttccttgacgcgtttgtcaagatcgtccgcgacgaagggcctactgaactctaccgaggcttaaccccaagtctgattggagtggtgccatatgctgcaaccaactacttcgcctatgacaccctgaagaaggtgtacaagaagatgttcaagacaaatgagattggcaatgtcccaacgctgctcatcgggtctgctgcaggagctatctcaagctcagcgacattccctcttgaggttgcacggaagcacatgcaagttggagctgttggtggcaggaaggtttacaagaacatgctccatgccctcctaagcattcttgaggatgaaggggttgggggcctctacaaagggttggggccaagctgcatgaagttgatgcctgctgctgggatttcctttatgtgctacgaggcttgcaagaagattctgatcgaagaagaggatgagtga

SEQ ID NO: 219 - DNA, 1221 bp, Artificial Sequence; identical to SEQ ID NO: 156
  cDNA of Zm00001d037640 - NC262A genotype

SEQ ID NO: 220 - protein, 406 aa, Zea mays; identical to SEQ ID NO: 157

SEQ ID NO: 221 - DNA, 2947 bp, Zea mays
atgcagcgcaggagcggcgatgtccggactccggacgctgggtttgcgctgctccccacgcggtttactattcctgatctccttccccttcctacgcatggctccccgtccattgctatgctccgccattgtccacacacctgcagccagccttctgcctttaaccccaccggcaatgtcagtagtcttgatttcctagcttccttccttccgctctctcactcctctgtaggtgcatccttgttcttcttgcatcgtatcgatctgtccatgccactggagtctgtacgtacgttgccattatacatgggctctgtttgcgtatgtatgtgcaggtgacctgatatcgacgggagggatggcaaggatactgctccatggttcgcttcatgtcaccatctttgaggcagaggagctgtcgaactccagcaggcccagcagccaggctcccgggttcctccgcaagctggttgaggggatcgaggacactgtgggcgtgggcaagggcaccagcaagatctacgccaccatcgggctcggcaagacccgcgtcggccgcacccgcaagctcaccgacgagacggccagcccgcgctggtacgagtccttccacgtctactgcgcccaccttgcctccgacgtcgtcttcaccatccgggccaagaaccccatcggcgcctccaccgtcggtgtcgcctacctccccgtccgcgatatcttcgagggccacgaggtggaccgctggctccacctctgcgacggcggcggcgacgacaaggaccgcacgccgctcgagagcggcgggaaggtccacgtcaggctccagtacttcgacatctccaaggaccacagctggggcaagggcgtgcgcagtggaaagtaccccggcgtgccctacaccttcttctcgcagcggcaggggtgcagggtgacgctgtaccaggacgcgcacgtccccgacggctttgtcccgaggatcccactcgacggcggccggtgctacgaggcgcaccggtgctgggaggacatcttcgacgccatcagcggcgctaagcacctcatctacatcacgggttggtcggtgtacacggagatcacgctactcagggacggcgcccgcccacccaggcccggcagcggcgtcacgctcggcgagctgctcaagaagaaagccggcgagggcgtccgtgtgctcatgctcgtctgggacgaccgcacctccgtcggggcgctcaagaaggacgggctcatggccacccacgacgaggagacgatgaactacttcgagggcaccgacgtacactgcgtgctatgcccgcgaaaccccgacgactccgggagcatcgtgcaggacctgcagatctccaccatgttcacgcaccaccagaagatcgtcgtcgtcgaccacgacatgccggtgcagcggtcgcagcggcagcggaggatcctcagcttcgtgggcgggctggacctctgcgacggccgctacgacacgccatgccactcgctgttccggacgctggacggcgcgcaccacgacgacttccaccagccaaacttcgccacggccgccatcgccaagggcggaccgagggagccgtggcacgacatccactgtcgcctcgaaggccccgtggcgtgggacgtgctctacaacttcgagcagcggtggcggaagcagggcggcaaggacttgctcatccagctccgggacctcgccgacgagatcatcgccccgtcacccgtcacgttcccgaacgaccccgagacgtggaacgtgcagctctttcgctctatcgacggcggcgccgcgttcgggttcccggacacccccgacgacgccaccagggccgggctcgtcagtggcaaggaccagatcatcgatcggagcatccaggacgcctacatccacgccatccgccgcgccaggagcttcatctacattgagaaccagtacttcctcggcagctcctactgctggaagcccgacgggatcaagcccgaggacatcggtgcactgcacgtcatccccaaggagctgtccatgaaggtggtgagcaagatcgaggccggcgagcggttcgcggtctacgtcgtggtgcccatgtggcctgagggcatcccggagagcggctccgtgcaggccatcctcgactggcagaggaggaccatggagatgatgtacaccgacatcgcacaggcgatccaggccaaggggatcgacgccaatcccagggactacctcaccttcttctgcctcggcaaccgggaggcgaagaagccaggggagtacgtgcccacggaggaggctgagcctgacactggctacatcaaggcccagcaaaacagaaggttcatgatctatgtccacaccaagatgatgatgggtaatccgtccgtccacccttcctcctagaattactcttgatttttcgaattcgaggcgcccatcttcttagaatatattactcttgaattattatcaaaatcgaaatttgctgtgtgtgcagtggatgacgagtacatcatcgtggggtcggcgaacatcaaccagcgttccatggacggggcgcgggactcggagatcgcgatgggcgcgtaccagccgcaccacttggcggcggcgagcaggccggcgagagggcaggtgcacgggttccggatgtcgctgtggtacgagcacctgggcgcggtggacgacgcgttcacccggccggacagcgtcgagtgcatccgcaaggtgaacgccatggcagacaggtactgggacctgtacgccggcgacggtcccgagcgggacttgccggggcacctgctcacctatcccgtcgccgtcgcctgtgacggctcggtcaatcagctgccggggatggagttcttcccagacacgcaggcgcgggtgcttggcgccaagtccgactacctgccgcccattctcaccacgtag

SEQ ID NO: 222 - DNA, 2721 bp, Artificial Sequence
  cDNA of Zm00001d037643 - NC262A genotype
atgcagcgcaggagcggcgatgtccggactccggacgctgggtttgcgctgctccccacgcggtttactattcctgatctccttccccttcctacgcatggctccccgtccattgctatgctccgccattgtccacacacctgcagccagccttctgcctttaaccccaccggcaatgtcagtagtcttgatttcctagcttccttccttccgctctctcactcctctgtaggtgacctgatatcgacgggagggatggcaaggatactgctccatggttcgcttcatgtcaccatctttgaggcagaggagctgtcgaactccagcaggcccagcagccaggctcccgggttcctccgcaagctggttgaggggatcgaggacactgtgggcgtgggcaagggcaccagcaagatctacgccaccatcgggctcggcaagacccgcgtcggccgcacccgcaagctcaccgacgagacggccagcccgcgctggtacgagtccttccacgtctactgcgcccaccttgcctccgacgtcgtcttcaccatccgggccaagaaccccatcggcgcctccaccgtcggtgtcgcctacctccccgtccgcgatatcttcgagggccacgaggtggaccgctggctccacctctgcgacggcggcggcgacgacaaggaccgcacgccgctcgagagcggcgggaaggtccacgtcaggctccagtacttcgacatctccaaggaccacagctggggcaagggcgtgcgcagtggaaagtaccccggcgtgccctacaccttcttctcgcagcggcaggggtgcagggtgacgctgtaccaggacgcgcacgtccccgacggctttgtcccgaggatcccactcgacggcggccggtgctacgaggcgcaccggtgctgggaggacatcttcgacgccatcagcggcgctaagcacctcatctacatcacgggttggtcggtgtacacggagatcacgctactcagggacggcgcccgcccacccaggcccggcagcggcgtcacgctcggcgagctgctcaagaagaaagccggcgagggcgtccgtgtgctcatgctcgtctgggacgaccgcacctccgtcggggcgctcaagaaggacgggctcatggccacccacgacgaggagacgatgaactacttcgagggcaccgacgtacactgcgtgctatgcccgcgaaaccccgacgactccgggagcatcgtgcaggacctgcagatctccaccatgttcacgcaccaccagaagatcgtcgtcgtcgaccacgacatgccggtgcagcggtcgcagcggcagcggaggatcctcagcttcgtgggcgggctggacctctgcgacggccgctacgacacgccatgccactcgctgttccggacgctggacggcgcgcaccacgacgacttccaccagccaaacttcgccacggccgccatcgccaagggcggaccgagggagccgtggcacgacatccactgtcgcctcgaaggccccgtggcgtgggacgtgctctacaacttcgagcagcggtggcggaagcagggcggcaaggacttgctcatccagctccgggacctcgccgacgagatcatcgccccgtcacccgtcacgttcccgaacgaccccgagacgtggaacgtgcagctctttcgctctatcgacggcggcgccgcgttcgggttcccggacacccccgacgacgccaccagggccgggctcgtcagtggcaaggaccagatcatcgatcggagcatccaggacgcctacatccacgccatccgccgcgccaggagcttcatctacattgagaaccagtacttcctcggcagctcctactgctggaagcccgacgggatcaagcccgaggacatcggtgcactgcacgtcatccccaaggagctgtccatgaaggtggtgagcaagatcgaggccggcgagcggttcgcggtctacgtcgtggtgcccatgtggcctgagggcatcccggagagcggctccgtgcaggccatcctcgactggcagaggaggaccatggagatgatgtacaccgacatcgcacaggcgatccaggccaaggggatcgacgccaatcccagggactacctcaccttcttctgcctcggcaaccgggaggcgaagaagccaggggagtacgtgcccacggaggaggctgagcctgacactggctacatcaaggcccagcaaaacagaaggttcatgatctatgtccacaccaagatgatgatggtggatgacgagtacatcatcgtggggtcggcgaacatcaaccagcgttccatggacggggcgcgggactcggagatcgcgatgggcgcgtaccagccgcaccacttggcggcggcgagcaggccggcgagagggcaggtgcacgggttccggatgtcgctgtggtacgagcacctgggcgcggtggacgacgcgttcacccggccggacagcgtcgagtgcatccgcaaggtgaacgccatggcagacaggtactgggacctgtacgccggcgacggtcccgagcgggacttgccggggcacctgctcacctatcccgtcgccgtcgcctgtgacggctcggtcaatcagctgccggggatggagttcttcccagacacgcaggcgcgggtgcttggcgccaagtccgactacctgccgcccattctcaccacgtag

SEQ ID NO: 223 - protein, 906 aa, Zea mays
MQRRSGDVRTPDAGFALLPTRFTIPDLLPLPTHGSPSIAMLRHCPHTCSQPSAFNPTGNVSSLDFLASFLPLSHSSVGDLISTGGMARILLHGSLHVTIFEAEELSNSSRPSSQAPGFLRKLVEGIEDTVGVGKGTSKIYATIGLGKTRVGRTRKLTDETASPRWYESFHVYCAHLASDVVFTIRAKNPIGASTVGVAYLPVRDIFEGHEVDRWLHLCDGGGDDKDRTPLESGGKVHVRLQYFDISKDHSWGKGVRSGKYPGVPYTFFSQRQGCRVTLYQDAHVPDGFVPRIPLDGGRCYEAHRCWEDIFDAISGAKHLIYITGWSVYTEITLLRDGARPPRPGSGVTLGELLKKKAGEGVRVLMLVWDDRTSVGALKKDGLMATHDEETMNYFEGTDVHCVLCPRNPDDSGSIVQDLQISTMFTHHQKIVVVDHDMPVQRSQRQRRILSFVGGLDLCDGRYDTPCHSLFRTLDGAHHDDFHQPNFATAAIAKGGPREPWHDIHCRLEGPVAWDVLYNFEQRWRKQGGKDLLIQLRDLADEIIAPSPVTFPNDPETWNVQLFRSIDGGAAFGFPDTPDDATRAGLVSGKDQIIDRSIQDAYIHAIRRARSFIYIENQYFLGSSYCWKPDGIKPEDIGALHVIPKELSMKVVSKIEAGERFAVYVVVPMWPEGIPESGSVQAILDWQRRTMEMMYTDIAQAIQAKGIDANPRDYLTFFCLGNREAKKPGEYVPTEEAEPDTGYIKAQQNRRFMIYVHTKMMMVDDEYIIVGSANINQRSMDGARDSEIAMGAYQPHHLAAASRPARGQVHGFRMSLWYEHLGAVDDAFTRPDSVECIRKVNAMADRYWDLYAGDGPERDLPGHLLTYPVAVACDGSVNQLPGMEFFPDTQARVLGAKSDYLPPILTT

SEQ ID NO: 224 - DNA, 441 bp, Zea mays; identical to SEQ ID NO: 165

SEQ ID NO: 225 - DNA, 441 bp, Artificial Sequence; identical to SEQ ID NO: 165
  cDNA of Zm00001d037647 - NC262A genotype

SEQ ID NO: 226 - protein, 146 aa, Zea mays; identical to SEQ ID NO: 166

SEQ ID NO: 227 - DNA, 8360 bp, Zea mays
atggagctggcggtgggcgcgtcggaggcaaccctcaagtcactgctgagcaagctcggcgccctcctcgcagaggagtatgccctgatccgtggcgtccggggcgacatccaattcatcaccgacgagctagccagcatgcaggccttcctcagcaacctgagcaagtacgaggagggccacgacgaccagacggaggactggatgaagcagatccgggacgtcgcctacgacatcgaagactgcatcgacgacttcgcccacagcctccgtccagaccccaggggcagcggctgggtgacggccgtccgcaagattctctacgagatccggacgtggtacccccgccgcaacatcgccacccagatcgtcgatctgaagaaccgcgcgcagcatatcggcgagcgccgaaccaggtacggcgtccgcgacccgcagcctgggaagaagaagagcaacttggggggcgctacggggtatctcgctgctgagaatcaggacgtgacccggcaactcgtccgcgcccagcagcctgtgggggtgaaggatatgccggatcttaagaagtggatccatgaagatggcaagagggagaaaaccggcgtgctgagcattgtcgggtttggtggtgtgggtaaaaccaccatcgcaatggatctctacacaaaatacgggcctgaattccagcgtcgagcaatggtcactgtgtcccagaactcagatcctgaggcggtcgtcagaaatatactgaaccaggtcaaaccactgtccaacaacgcggagaggcgaggcgaagatagctctggcgccgtctccttggggaagaagaatccagtcattgcaactatattaagccgaattaggctgccgttcccaaatcaaaagcaagataatggtggcggtcgtgacaagcatgaacaaataaaaaaggagttgaagaattgcctcgcagatacaaggtatacctctatctctactactataaaacaccacttttcctggtttctaccttggtcccttttcaaaaagtcatcacaattatttttaatttaaactacggtctaaacatcaactttaacgtccacgcccaccggtttgcacgtttatgcaaaactaaggtaaaattgtgcataagtcagagttcgaacttggttgttgtctccaacagaacacacatttttgtgcttttttaaaacaaatacatatggcatatagaaaccatagtgatgcacgggcatttgactagttaattaatatatacaacccttttctctccctgtaccacttttaaactgttctatatattaatatattattatcgtctacatttggtgctttatagaagggcgggcctggtgcagcggtagagcctaccgtctgtaaccggaaggttccgggttcgagcctcagcctctgcatattatgcgggtaagacttgacgcttaaagatacccttccccacagaccccgtatagtgcgggaagcctacgacactgggtacgccctttttacatttggtgctttatatggaaatatttagaacctatttattaccacgcctattattctattgctctaactagagcatttgatatacgagcaagcaagatccattgtagatttcaatatagcactaatggatacattgtatttttaggaaaaaagtttggtacaagtttcatatttttcggataaaaaatgaatttgacatgatttttagaaattaaacattattatattatctctataaaataaatataaaaccaacacttaaaccaagtttgagggtgtactttgtctggtttttatagtttgagggacctagatacctaacttcatagttcaaggttgaaaatcgaatgccagtttgtaaaatggactttgctctttattcttcacctctgaatatccacattgccaatgtcttctgtcttcatcgcagagagcagtcaattgattccaaagacatgtcttctacttcactttcttttccttttcctagtaaggtttttagttagcttcaacaagttttgtcccgatatatattgttcagccttgatacattaattttggtatctatgccctgaacttctaatgtcttgtttatttccctagttagtagcttgggtaggtttatgatccagcgcagaggcggatctacgatccagacgttcggtattcaaaatcacattaggtgctcaaaattttgaagaataaagaaaattttcccttgtcaaaaatgtacgtatagtgtatggaaattgtttttgtgtgaatcatgggtatttgacataatgcccattatccttctgtgcctgcccctgatccagcgtatgatggcaacgatgagtaaatagttctaacttttatgaatagttctatgtgtagtcttgactttccccacacataattgggttctcaagactgacctcaccaaactttctatcccacattttctatttcgaactccactgtgcctacagtgcgtgaacagtttcgtgcaagtccatatacatggacctcgcaggacttgcaaaccccacacgtagaacaatggtatgcacaagtattgataccatcggtgtgtgcaaatgttatacaaaccttgtcacaaccaaaagcaatgtactaagtagtataatcaagcgcttgcaagcactaagccatactatatatgcacctaaacactttattggctagagcttcacaggaatgaatctctatccaagagtatattctagtaactcttaactacactaaaacgagcaccaaccatcaaactaactgttgctccaatttgactatttatgtgttcgatgtacaactagactgtcaggtgcgtgcaatcgattcagtgtcatcatcaaactcaatatctcctcaggtcatttaatcttgtgaatcgttagaccatccaatgcattatgcatttcctttaccaagctcttctaatcactggacctttcaatgttcactaacattcttataatcggaccatctagtgctaagagttgtgcatcattgcttggtcttcatttttcattactttcctcaccaatttgttcggtgcatgtttctccattgtctaggccatcaacttcttgaaaattctgaactgtggtttattcagtgtgatgtcttaggtcttctagttggtattctaggtcttctcttgtactctcgatcactcctttgaggtgtttgtttaccaagtccattactttcatcattggaactaaatgaaatattttagcaagctatattagtcacaatggttatgttgtcactcaaataccaaaatctcatacaagttgtttttgatagtaaaggctataggggaaacccccacaacagtaaaatatattaaaataattataaaaaaggtgggacaagactatacaataagaagaacaaaacaaaaaacagagaatgaataaggaataaaaaacaacaactactaagatttagcgaggtcagagagaagttagccagagaggcacaagcaatttaaggtctgggctaaatttgagcatctgaagcttcagcgtatcattgaagcaagtcttctaggagttgaaagacaagacatattccctgaaaatagctgcattccgttgcttccagatttcccaagcagagtctaccagaacttccatgaagaagggattgtgaattgattccttgtattagccaccatgtgaaagaagtctagagcatggtcccattggatacccacaaagttccagcactcaacactgaagggacactcaaagagcaagcaataagtagtctcttcacaattcagattgcaaagagtgcaactgtgatcattatttgtcaatgcataaccttttctccttagaagattctttgagttgattctgcctctgaataccagccaaatgaaaactttaagctttttggccacttttgacttccagatccaggtaaaaggaggaggtggctgtatacattgaaaattcaaattgtagactctggtggaacagaaattgttatttccccaggagtaagtccacctgtcttgtccactcatgtcactctgaatcaaggcagcaaagttgctcaactccacatatgcctcatgaacttcaggagataatggggaatgaaaattttcctcgagagttggattcccaagatactccataagagagcaatccttctttttagcaaacgagtataagcaagggtaaacctgtttgggcaaagagttgttctaaacatcttgccagagaagtatggtcttactcttaccatcatcagcttcgggcatagcaacccccctaaaatgatcaatcagtctagagatgtctttccaccaaaaggaacctttttcgggagagcaatggggaattctacccgatcttttgtgcatgttccttataagattcacccaaggtgtgtcatgcctaccatagaacttatgcagaaatttcatcagaagggccctgttttgaattttaagattgtgcactcccagatctcctttgctcttaggagaggtaactttgtcccagacaataaggggagttgatttcacattaacatcacttcctttctagagacagtttcttgcacgatcaatagagttgatatccgaggatgggagcttctgaggcacattgcataaatcggcattgcccagaaagtggagttgaccaatgtcagcctcccagccatcgatagccacatgctggtcatgttcaaccttctttcaatcttgttgttgacagggagataatcttgaactttaggcctagaggtcccaattggcaaaccaagataagtaaggggaaggaaccaatttgacaactaaacacagcagccaactgagtgcctttaatagcgtccaagttgataggaaggaggcactacttgctgtaaataactttaggacctgtcaatcctgagaaggaatgaagaatcccctttaggcaaaataactctcgttgagatgctttcataatgatcaaggtaccatcagcataattatggggaactctgactggctgtgggtcataacaggaactgataaggtaccaatacatgctgctttgttaataatgtattgaagaagcttagcagccaaaacaaagagcaaaggggacaaagggtctccctggtgcacccctcttctacattgaaatttttgccagggacaccatttaacaaaacagccgaagtgcctgagcaaagaactgagtgaacccactaattccattttcaggcaacccaagtgaaaagaacacaaacgcctaagaggggggggggagtgaattaggacttctaaaaatctcgttagtctaggccacaaataaatctcctaaacaaaaccaatgcaaataactaaacaagaatgtgcaatctaggttttatctaactgttgctatctctatcgcaaaagagttatgcaatctaagttctaatcctatattctactgagaatggtaagattgcaacttaagtaatcaatgtaactgtagaagctaaagagcagaggtagagattgcaaactcccgtggacgcatcgatattttaccgaggtatctaggaccgtgcaaggttctgactaatcctcgttggtgaccctacgcaaagggaagatcatgtgagggctaagcatcgggacaggtaactccgtagagagccgcagtgataggattataactcctaccagagagactgcacagattgtagggatgaggcgttgcgggttggcgcaggggcgccgtgaccgggcgcttggcggactggcgcagggggcgctgtggccacgctgttcttcggcggacgctggacgacgactttgggagaggaaaactcgactgcttcctttggaggaagtaagctaaatagttttctgcttaattcatatagacttatactcccttctagtccttatctaaagagatcaaatctgagatcccctcttctctaacaaaccttatctaactaatctgcatgaaatcccctcttttctctctaacaaaccttatctccttaatcttctaatccttatctaactaatctgcatgcctatttttggccgccgctctgctgttgtccgatgcctgtagtggcggccggtcataacactccccgcctgcgccctggctgtctgctgcttcatgtgcctttcatttttgtttccatacatgatactagtagaatgcgttaataagccaaataccagtattcatgtatattgccaccacatagtgccggcctctagtcaagcatgccctctcccaaaacatctcccgaatccaaagcccactcaacatttgtgagactgctatgtggaaatatatggtaatccactaatcctgatgtgtgtttgtttcgtattccttgacaggtacttactgttaattgatgatgtatggtcatcatcaacatggcaaagtatttggaaatattttcctgaagaaaataagaagggaagcagaataattgtcaccacacggtttcaagctgttgccacgacatgctctgcacataaagatcaagatcatattcatttggttgatgttctttccggtgaagaggccaacagtttattcatcaaaaccttgtccgagtgtagaggtaatagtgccagacaatcaaaccagaccaaggtgccagacagagtttggcagatgtgtggtggcttgccgttggccatagttaccatggcaggtgtggtggcatccaagccactgatgatcagagatgaatggattgccgtttgcaattccttgtttccggagccagaaaaatgtcataaaccagaggaatttatgaggataataaactattgctacaacgacttgcctagtgatctcaagacttgctgtctgtatcttagcatatttcctaagggccgtgaagttagcaggaagcggctgattcggaggtggatagcggaaggtttcgtcagtgagaagcaaggtttgagtgtggaggatgttgctgacacatgcttcaaacagctcattgaaaggaagatgatgaggcccgttgagcacaacagcaatggaagcgtcaaaagttgtcgggtccatgacatggtacttgagtacatcatttccaaggcagcagaggagaatttcatcactgtggtcggtagccactggtccatgtcaacaagtagcaagaaagttcgtaggctcactatccatggcagtgaccccaaacgtgcaaagaatgttgacagtatgaacttgtcacatgtccgatcactgactgtgttcgagaacctggacaaactgcacttcaaatcatttaaaactggaatagtgcaagtgttagatctcgaaggctgcaaaggtttcagggagagcgatgccaacgtttcagacatatgcgaaatgattctacttaagtatctgagcctacggaaaacagacataaaaaatcttcccaataatatttccaagctcaagtacctagagactctcgatgttagggagacagaagttaaacagctgcctacgactgtagggcagttggaacggataactaacatccttggtggtgataagagaagacagagaaccctgaaacttcctaaggagctcaagggaacaatgaaatctttacgcatattgtcgggggttgagattgtggagggatcaacagctgcatcagacttcagttacttcactactctgaggaagctggcaatttacaggatccaccacaatgaagatatattcaaaaatttgctgtcctcgatccagtacctcagtggttattcactccaaactcttttaatcgttgatgagtcatctgaattcttcaagaccctggagtcaatgtcgccatcccatctaactgacctgagagctctggagctgtctggcaaattgctttaccttccaaagtggctcgacactcttcaacatcttgtgaagttaacgctttcagcaacagccctatgcactgataactttttggtcatcagaaaactgaactcgttgttttccctcaccttttcaatcagcgaaaagcaagaccctgctttggcagccattcttgagaaaaataagtcagcttcaagaggagaaatcgttgtgccagctggaggcttcagtaagctcaagctgcttcggatatttgttcctcttcttccatcccttaccttctcaaagaatgctacaccacatctggaaaggattgaactgcgttttaaaaagctggaaggatttcatggtgtggatgaacttggaaagctccaggatgtggtattaacagttgacgggcatgcaagtgagaggacaaattcgatactagacggattgaagcacaggctagaaggaaagtgcaacctcattgtcaacaagtatcacgactga

SEQ ID NO: 228 - DNA, 2946 bp, Artificial Sequence
  cDNA of Rpp13 - NC262A genotype
atggagctggcggtgggcgcgtcggaggcaaccctcaagtcactgctgagcaagctcggcgccctcctcgcagaggagtatgccctgatccgtggcgtccggggcgacatccaattcatcaccgacgagctagccagcatgcaggccttcctcagcaacctgagcaagtacgaggagggccacgacgaccagacggaggactggatgaagcagatccgggacgtcgcctacgacatcgaagactgcatcgacgacttcgcccacagcctccgtccagaccccaggggcagcggctgggtgacggccgtccgcaagattctctacgagatccggacgtggtacccccgccgcaacatcgccacccagatcgtcgatctgaagaaccgcgcgcagcatatcggcgagcgccgaaccaggtacggcgtccgcgacccgcagcctgggaagaagaagagcaacttggggggcgctacggggtatctcgctgctgagaatcaggacgtgacccggcaactcgtccgcgcccagcagcctgtgggggtgaaggatatgccggatcttaagaagtggatccatgaagatggcaagagggagaaaaccggcgtgctgagcattgtcgggtttggtggtgtgggtaaaaccaccatcgcaatggatctctacacaaaatacgggcctgaattccagcgtcgagcaatggtcactgtgtcccagaactcagatcctgaggcggtcgtcagaaatatactgaaccaggtcaaaccactgtccaacaacgcggagaggcgaggcgaagatagctctggcgccgtctccttggggaagaagaatccagtcattgcaactatattaagccgaattaggctgccgttcccaaatcaaaagcaagataatggtggcggtcgtgacaagcatgaacaaataaaaaaggagttgaagaattgcctcgcagatacaagatccaggtacttactgttaattgatgatgtatggtcatcatcaacatggcaaagtatttggaaatattttcctgaagaaaataagaagggaagcagaataattgtcaccacacggtttcaagctgttgccacgacatgctctgcacataaagatcaagatcatattcatttggttgatgttctttccggtgaagaggccaacagtttattcatcaaaaccttgtccgagtgtagaggtaatagtgccagacaatcaaaccagaccaaggtgccagacagagtttggcagatgtgtggtggcttgccgttggccatagttaccatggcaggtgtggtggcatccaagccactgatgatcagagatgaatggattgccgtttgcaattccttgtttccggagccagaaaaatgtcataaaccagaggaatttatgaggataataaactattgctacaacgacttgcctagtgatctcaagacttgctgtctgtatcttagcatatttcctaagggccgtgaagttagcaggaagcggctgattcggaggtggatagcggaaggtttcgtcagtgagaagcaaggtttgagtgtggaggatgttgctgacacatgcttcaaacagctcattgaaaggaagatgatgaggcccgttgagcacaacagcaatggaagcgtcaaaagttgtcgggtccatgacatggtacttgagtacatcatttccaaggcagcagaggagaatttcatcactgtggtcggtagccactggtccatgtcaacaagtagcaagaaagttcgtaggctcactatccatggcagtgaccccaaacgtgcaaagaatgttgacagtatgaacttgtcacatgtccgatcactgactgtgttcgagaacctggacaaactgcacttcaaatcatttaaaactggaatagtgcaagtgttagatctcgaaggctgcaaaggtttcagggagagcgatgccaacgtttcagacatatgcgaaatgattctacttaagtatctgagcctacggaaaacagacataaaaaatcttcccaataatatttccaagctcaagtacctagagactctcgatgttagggagacagaagttaaacagctgcctacgactgtagggcagttggaacggataactaacatccttggtggtgataagagaagacagagaaccctgaaacttcctaaggagctcaagggaacaatgaaatctttacgcatattgtcgggggttgagattgtggagggatcaacagctgcatcagacttcagttacttcactactctgaggaagctggcaatttacaggatccaccacaatgaagatatattcaaaaatttgctgtcctcgatccagtacctcagtggttattcactccaaactcttttaatcgttgatgagtcatctgaattcttcaagaccctggagtcaatgtcgccatcccatctaactgacctgagagctctggagctgtctggcaaattgctttaccttccaaagtggctcgacactcttcaacatcttgtgaagttaacgctttcagcaacagccctatgcactgataactttttggtcatcagaaaactgaactcgttgttttccctcaccttttcaatcagcgaaaagcaagaccctgctttggcagccattcttgagaaaaataagtcagcttcaagaggagaaatcgttgtgccagctggaggcttcagtaagctcaagctgcttcggatatttgttcctcttcttccatcccttaccttctcaaagaatgctacaccacatctggaaaggattgaactgcgttttaaaaagctggaaggatttcatggtgtggatgaacttggaaagctccaggatgtggtattaacagttgacgggcatgcaagtgagaggacaaattcgatactagacggattgaagcacaggctagaaggaaagtgcaacctcattgtcaacaagtatcacgactga

SEQ ID NO: 229 - protein, 981 aa, Zea mays
MELAVGASEATLKSLLSKLGALLAEEYALIRGVRGDIQFITDELASMQAFLSNLSKYEEGHDDQTEDWMKQIRDVAYDIEDCIDDFAHSLRPDPRGSGWVTAVRKILYEIRTWYPRRNIATQIVDLKNRAQHIGERRTRYGVRDPQPGKKKSNLGGATGYLAAENQDVTRQLVRAQQPVGVKDMPDLKKWIHEDGKREKTGVLSIVGFGGVGKTTIAMDLYTKYGPEFQRRAMVTVSQNSDPEAVVRNILNQVKPLSNNAERRGEDSSGAVSLGKKNPVIATILSRIRLPFPNQKQDNGGGRDKHEQIKKELKNCLADTRSRYLLLIDDVWSSSTWQSIWKYFPEENKKGSRIIVTTRFQAVATTCSAHKDQDHIHLVDVLSGEEANSLFIKTLSECRGNSARQSNQTKVPDRVWQMCGGLPLAIVTMAGVVASKPLMIRDEWIAVCNSLFPEPEKCHKPEEFMRIINYCYNDLPSDLKTCCLYLSIFPKGREVSRKRLIRRWIAEGFVSEKQGLSVEDVADTCFKQLIERKMMRPVEHNSNGSVKSCRVHDMVLEYIISKAAEENFITVVGSHWSMSTSSKKVRRLTIHGSDPKRAKNVDSMNLSHVRSLTVFENLDKLHFKSFKTGIVQVLDLEGCKGFRESDANVSDICEMILLKYLSLRKTDIKNLPNNISKLKYLETLDVRETEVKQLPTTVGQLERITNILGGDKRRQRTLKLPKELKGTMKSLRILSGVEIVEGSTAASDFSYFTTLRKLAIYRIHHNEDIFKNLLSSIQYLSGYSLQTLLIVDESSEFFKTLESMSPSHLTDLRALELSGKLLYLPKWLDTLQHLVKLTLSATALCTDNFLVIRKLNSLFSLTFSISEKQDPALAAILEKNKSASRGEIVVPAGGFSKLKLLRIFVPLLPSLTFSKNATPHLERIELRFKKLEGFHGVDELGKLQDVVLTVDGHASERTNSILDGLKHRLEGKCNLIVNKYHD

SEQ ID NO: 230 - DNA, 5940 bp, Zea mays
atggagttcgcaactggagcgctaggcacccttcttctcaagctctccatgctgcttcatggtgagtacaacctggagaagggcgtcaggggggacatccagcgcgtcatgaacaagctcgagcgggttcattctgtcctcggccatgttgtcgaagtgcctgtgccactgaagccacgtcctgatctggtcagaatgttggcacgcagcgtcagggagctatcctacgacatggaggacttcgtcgacaccttcctggtgcgtgtccaaggccctgaacgcaccagcaaaagaagcgccaaaatattcatgaataagacatatatggtcgtgaatcgccatgagatcgcccagaccatcaaggacttcgaagagcgcgtccagcagatagatgagcgtcgtcaaaggtcattgaaacacttaatttccactttggcttgcgtgcatatgaactttcacctttactgtctttcttccattttatttccttttctggttctaacaggtacgatgttgatgctatggttccccgtgtcaaaaccttggttgatcctcgcatatttgctctgaagtacaccaaggccacggaccttgtcggcatggatgaggcaagggaggaactaatcacaaggttgaccaaggaagatgacacctccactgaacaaaggcgagtctctatcgttggttttggaggacttggcaagacagcgcttgcaaaagcagtttatgacaaacttaaagctaaaggggaattccattgcgcggcctttgtgtcggtgtctcggtttcctcagctcgaaaaattcttcaaggaattgctttatgagcttgacgagactgagtacaaggaacttattgacatcagcaccccattggaacttatgaatctagtgcatgaattccttcataataagaggtacacgcgtacatgtaccacacctagtgtgcattatatgttcattccacggaaatatccatattatagagtaatatgcttatatatattattgcaattcatatctttagctatgcttacattacttctccaattaatacaataaatataggtaccttattgctgtcgatgacatatgggatactgacgcatgggcaatgatacaatgggcttttcctgagaataagctaggaagcagaataatcgcaactactcgcagaattgatgttgctgagtatgtaggtggttgctatatgatgaaacctcttactcgagagaaatcaaatatattattctatggacgaatatttggctctgaaggtaaatgtcctcctgaactttctgatgcgtctgagaaaatattgaataaatgcggaggcgtgccattggctattattactacatctagcttgctggctagtaagtcaagaaacataaaagaatggtacaatgttgctgattctattggttccagaatactaaaaaacagtactgaaatggagaatttgaggaacatactgctgcttagctattatgatctaccagcacgattaaagacatgtttgttatatctgagtattttccctgaagattgtgagattgggatgcatcggttaatatggaggtggatagctgaaggttttttcaatggagaactagcacatgatgggctctttaaccttggcgaatcttgtttccacgagctcataagaagaagcatggtgcagccagtaacacttgaaggcacgggtcttgtatatgcttgtcgtgttcataatatgtttcatgatttgatcctctacatgtcacacgaagaagaatttgtttctgcagtcaatgaaaagtttggtcttctagatgttcgttctcggcggttagcattccagaacataacaaaagagcagtacagacttgtggaacatccacggctggcacaattgaggtcacttaatgccattggatgtcctatatacgcgatacctccaattgaaagctataaattattgcgtgtactggatttcgaaaattgtgcaggtattgaaggccatgatcttgttcatcttgggaaattgcatcacctcaagttccttgggctaagaaacacgtttatcggtaagctgccggaaggaatagggaacctcaagtttctgcaaacattggacctcgatggaactggtgtggaagaattacctcaagccttgcataatcttacagaattgatgtgtctaattgctgactggagaacgagagtgcccaattggattggtaacctcacgtccctgcagcacttggtgatttatcctggtgggcatgacgatgaggattctgcgagcaggtttgttaatgagctgggaaagctgagacaactaagggtgctccgttttttgataaaagcacaagatgaatggcagctgagagatttgctagagtccctatcgaatctgccagagatcgaggctatacattttgattactatggagtacagttaaatagaggtgttcagttggaacctgaaggctatgccctctctagacatattcgttccatggaattgcgctggttggagttctcaaggctgcctctttggattaatcctggacatcttcctaacctctaccacttatggctgatggtatctgaggcggaagaacgggatctggaaatccttggggggtttccagtgcttcactccctccacttgttgattgtgaatactgaacgtgaagatgtcatgacttgtggctgtggtggattcaagaatttgaaatgctgcagtataactaaaccgctgaaatttgtacatggagctattgaagtcctcgatttccatttcagtgtgcaactcctaacggattcaaaccaagattttgattttgactttggcttgggaaacctacattggcttcagcaagccatcgttcaaatcacagcccttggtgaggaggtggagtctgtggggagagcacaggtggctctgcgggatgcaatacgtacccatcccaaccgtcctacccttgaaataaacttatttgggcaaacaatacctccagagttaccaaaggtcaggactctttgtcatctctctctcacctcatttcgttgtcttgttttcatttgccttatttcactgtttcagcaagacgacgatggagcgaaaattgtggagatatcaccggccgagagtagtcgtcaagctcaagagcgggagaaaagaagcatcgatgtggcgacgaagaaagcaacacgggtgccgtctttttacacaaagtcatcaattgatgagccaatggatcagctcataaacatgctatctgtggttgatgacgaagcctacactaagaacataaagatactatctattgtaaggtctgagggactggggaagactactctggcccaaaaagcattcgaagagctccattcgcaatttgaccgtggggcgttcgttctactaggccagaatcctgacttgaggagagtttttgctgacattctccgtggtcttgacaagcaaaggtacatagatttcccagtggcaatattggatctagtggacctgatctggctagtccgtaaatcgctcataaacaaaaggtatgtccaacccactaacatgctagtactacctttattcagctatatatttgctcaatatattgtctccgttctttttttttatttgacgtggttgattattttttcttcaaaattctaatcactcgtgtactaaaaaaaatctgtgtgttatatccatgagtgttatttcgacactgccggttaaaccggtgagtattgatttatctgattttgctttgtttgacttggttcttcttggtgtcttcagcatttcatcccatagacctataaacctgagaatatacatctagaaaacattgttaatctaagtgttgtgtgtcaatcaatcaccaaaacgaagcaccgaaatatgacataagagaccatttttgctacagttgttgtcagtagtagttactactaaatatggattataacccttggatactattatttttccaggttctttattgtatttgatgatatatgtgatgtaaaagcatgggaaattataaagtgcgctttgattgaaaataacaaccacagtgtagttcttacgacaagtcgcaacactggtattactgaaattattggtggcagcaagcaattacaacctctatcagcaactatctctaaaaatctactctgcaaaaggttatttggatcggcaggcaagtgtccttctgaactagtaaatatatgtgacaatcttgtagaagaatgtggtggaatactatctgtgatcgacgaaactgtgacattgcttgcaagtataccaccaacagtggagaactgggaggcagtgtacgccagaagaatgttggatcggtcttatcctggtttaactgacagtctaaagaattgcttactctattttactatgtttcgaagaggacatgagattagtggagaacacttaatatgtgcatggatagctgaaggttttgtacatgggcaagaggtagcagagacctaccttagtgatctagtaaaaaagaaattaatcgatgcagtggaggttgatgctggaggaaaggtcctcacgtgccgcatgtatgacttggtgcatgactttatcgtctcaaaatcaattgaagaacgatttgtttatattttaaatgactcggaaggcagagatttgtcagaagcagttcacgttcaccagcgactatacatccagggacataataacaaagaactagacctgcaaattccttggctgccccaagtgaagtcacttgtctcctgtggtactgcgccatccatcttaaagtttaagggtctacatgttatggatttaggggcctgtgaatctttgcaggctagtcatctcaagggtataaataatgtaagttctttgagatatctggtcataggaggtaagtgtatctctggcatccctaaggaaattgcgaagctggaacatttgcggacactagatttaagtgcaagtggtctaaatgaattgccagaatatgttttcatgataagaaaattggaacgcctaattgttaatagtcagatgaagatatcatatggtattgcaaagatgtctgctttacaggagctaggcgatatcaatgtcaccgacccagagttgctgaaaagtctctgtaagctaaccaaattgagggttcttagaatttccatatggtcatgggatgatagtttgaagaactattttaaacaactgtgtgacaacttgcgttcactggttcagtgcacggagaacatccagagtctctccataatgacatgctgctccctggttttcatggatgatttgggtgagaattggacccctcaatgtctccagaagctcgaggtcggttgcagcgcatttgacatattgccaagttggtttggctcactttctagtatcttcacgttaacaatcgaggtctacaagttgtcacaggacataattgatacgctcggaaggctgcctggtcttggttctctatccctgacatcgaaacaagaaccaaaaggatactttgtgatcggctctgacaggttcagtaagctagagagcttaaagtttgtgagcaatgcaatggtagagatgtttccacgtcaacaatcaaatggcacggaacagctcaaaaggctcatgattgtgttccatgcttcacgtacacaagatgtgaacaaagatttctgctttggtttggagaacctgtcttccctagagcatgttcgtgttgaaataatttgtttcgatgccagccataacatggtgaaaaacgcagaagctgcagttcggaaagctatatctggcacaagtatcccaaatctggaaatacgaagacttcaggaaaatagtatgatacaggacgaagcggacctctgtgatgcagtacaagagcagaataatcagaagcaccagaaaatgaagaggtactaa

SEQ ID NO: 231 - DNA, 4902 bp, Artificial Sequence
  cDNA of Zm00001d037650 - NC262A genotype
atggagttcgcaactggagcgctaggcacccttcttctcaagctctccatgctgcttcatggtgagtacaacctggagaagggcgtcaggggggacatccagcgcgtcatgaacaagctcgagcgggttcattctgtcctcggccatgttgtcgaagtgcctgtgccactgaagccacgtcctgatctggtcagaatgttggcacgcagcgtcagggagctatcctacgacatggaggacttcgtcgacaccttcctggtgcgtgtccaaggccctgaacgcaccagcaaaagaaggtacgatgttgatgctatggttccccgtgtcaaaaccttggttgatcctcgcatatttgctctgaagtacaccaaggccacggaccttgtcggcatggatgaggcaagggaggaactaatcacaaggttgaccaaggaagatgacacctccactgaacaaaggcgagtctctatcgttggttttggaggacttggcaagacagcgcttgcaaaagcagtttatgacaaacttaaagctaaaggggaattccattgcgcggcctttgtgtcggtgtctcggtttcctcagctcgaaaaattcttcaaggaattgctttatgagcttgacgagactgagtacaaggaacttattgacatcagcaccccattggaacttatgaatctagtgcatgaattccttcataataagaggtaccttattgctgtcgatgacatatgggatactgacgcatgggcaatgatacaatgggcttttcctgagaataagctaggaagcagaataatcgcaactactcgcagaattgatgttgctgagtatgtaggtggttgctatatgatgaaacctcttactcgagagaaatcaaatatattattctatggacgaatatttggctctgaaggtaaatgtcctcctgaactttctgatgcgtctgagaaaatattgaataaatgcggaggcgtgccattggctattattactacatctagcttgctggctagtaagtcaagaaacataaaagaatggtacaatgttgctgattctattggttccagaatactaaaaaacagtactgaaatggagaatttgaggaacatactgctgcttagctattatgatctaccagcacgattaaagacatgtttgttatatctgagtattttccctgaagattgtgagattgggatgcatcggttaatatggaggtggatagctgaaggttttttcaatggagaactagcacatgatgggctctttaaccttggcgaatcttgtttccacgagctcataagaagaagcatggtgcagccagtaacacttgaaggcacgggtcttgtatatgcttgtcgtgttcataatatgtttcatgatttgatcctctacatgtcacacgaagaagaatttgtttctgcagtcaatgaaaagtttggtcttctagatgttcgttctcggcggttagcattccagaacataacaaaagagcagtacagacttgtggaacatccacggctggcacaattgaggtcacttaatgccattggatgtcctatatacgcgatacctccaattgaaagctataaattattgcgtgtactggatttcgaaaattgtgcaggtattgaaggccatgatcttgttcatcttgggaaattgcatcacctcaagttccttgggctaagaaacacgtttatcggtaagctgccggaaggaatagggaacctcaagtttctgcaaacattggacctcgatggaactggtgtggaagaattacctcaagccttgcataatcttacagaattgatgtgtctaattgctgactggagaacgagagtgcccaattggattggtaacctcacgtccctgcagcacttggtgatttatcctggtgggcatgacgatgaggattctgcgagcagaggtgttcagttggaacctgaaggctatgccctctctagacatattcgttccatggaattgcgctggttggagttctcaaggctgcctctttggattaatcctggacatcttcctaacctctaccacttatggctgatggtatctgaggcggaagaacgggatctggaaatccttggggggtttccagtgcttcactccctccacttgttgattgtgaatactgaacgtgaagatgtcatgacttgtggctgtggtggattcaagaatttgaaatgctgcagtataactaaaccgctgaaatttgtacatggagctattgaagtcctcgatttccatttcagtgtgcaactcctaacggattcaaaccaagattttgattttgactttggcttgggaaacctacattggcttcagcaagccatcgttcaaatcacagcccttggtgaggaggtggagtctgtggggagagcacaggtggctctgcgggatgcaatacgtacccatcccaaccgtcctacccttgaaataaacttatttgggcaaacaatacctccagagttaccaaagcaagacgacgatggagcgaaaattgtggagatatcaccggccgagagtagtcgtcaagctcaagagcgggagaaaagaagcatcgatgtggcgacgaagaaagcaacacgggtgccgtctttttacacaaagtcatcaattgatgagccaatggatcagctcataaacatgctatctgtggttgatgacgaagcctacactaagaacataaagatactatctattgtaaggtctgagggactggggaagactactctggcccaaaaagcattcgaagagctccattcgcaatttgaccgtggggcgttcgttctactaggccagaatcctgacttgaggagagtttttgctgacattctccgtggtcttgacaagcaaaggtacatagatttcccagtggcaatattggatctagtggacctgatctggctagtccgtaaatcgctcataaacaaaaggttctttattgtatttgatgatatatgtgatgtaaaagcatgggaaattataaagtgcgctttgattgaaaataacaaccacagtgtagttcttacgacaagtcgcaacactggtattactgaaattattggtggcagcaagcaattacaacctctatcagcaactatctctaaaaatctactctgcaaaaggttatttggatcggcaggcaagtgtccttctgaactagtaaatatatgtgacaatcttgtagaagaatgtggtggaatactatctgtgatcgacgaaactgtgacattgcttgcaagtataccaccaacagtggagaactgggaggcagtgtacgccagaagaatgttggatcggtcttatcctggtttaactgacagtctaaagaattgcttactctattttactatgtttcgaagaggacatgagattagtggagaacacttaatatgtgcatggatagctgaaggttttgtacatgggcaagaggtagcagagacctaccttagtgatctagtaaaaaagaaattaatcgatgcagtggaggttgatgctggaggaaaggtcctcacgtgccgcatgtatgacttggtgcatgactttatcgtctcaaaatcaattgaagaacgatttgtttatattttaaatgactcggaaggcagagatttgtcagaagcagttcacgttcaccagcgactatacatccagggacataataacaaagaactagacctgcaaattccttggctgccccaagtgaagtcacttgtctcctgtggtactgcgccatccatcttaaagtttaagggtctacatgttatggatttaggggcctgtgaatctttgcaggctagtcatctcaagggtataaataatgtaagttctttgagatatctggtcataggaggtaagtgtatctctggcatccctaaggaaattgcgaagctggaacatttgcggacactagatttaagtgcaagtggtctaaatgaattgccagaatatgttttcatgataagaaaattggaacgcctaattgttaatagtcagatgaagatatcatatggtattgcaaagatgtctgctttacaggagctaggcgatatcaatgtcaccgacccagagttgctgaaaagtctctgtaagctaaccaaattgagggttcttagaatttccatatggtcatgggatgatagtttgaagaactattttaaacaactgtgtgacaacttgcgttcactggttcagtgcacggagaacatccagagtctctccataatgacatgctgctccctggttttcatggatgatttgggtgagaattggacccctcaatgtctccagaagctcgaggtcggttgcagcgcatttgacatattgccaagttggtttggctcactttctagtatcttcacgttaacaatcgaggtctacaagttgtcacaggacataattgatacgctcggaaggctgcctggtcttggttctctatccctgacatcgaaacaagaaccaaaaggatactttgtgatcggctctgacaggttcagtaagctagagagcttaaagtttgtgagcaatgcaatggtagagatgtttccacgtcaacaatcaaatggcacggaacagctcaaaaggctcatgattgtgttccatgcttcacgtacacaagatgtgaacaaagatttctgctttggtttggagaacctgtcttccctagagcatgttcgtgttgaaataatttgtttcgatgccagccataacatggtgaaaaacgcagaagctgcagttcggaaagctatatctggcacaagtatcccaaatctggaaatacgaagacttcaggaaaatagtatgatacaggacgaagcggacctctgtgatgcagtacaagagcagaataatcagaagcaccagaaaatgaagaggtactaa

SEQ ID NO: 232 - protein, 1633 aa, Zea mays
MEFATGALGTLLLKLSMLLHGEYNLEKGVRGDIQRVMNKLERVHSVLGHVVEVPVPLKPRPDLVRMLARSVRELSYDMEDFVDTFLVRVQGPERTSKRRYDVDAMVPRVKTLVDPRIFALKYTKATDLVGMDEAREELITRLTKEDDTSTEQRRVSIVGFGGLGKTALAKAVYDKLKAKGEFHCAAFVSVSRFPQLEKFFKELLYELDETEYKELIDISTPLELMNLVHEFLHNKRYLIAVDDIWDTDAWAMIQWAFPENKLGSRIIATTRRIDVAEYVGGCYMMKPLTREKSNILFYGRIFGSEGKCPPELSDASEKILNKCGGVPLAIITTSSLLASKSRNIKEWYNVADSIGSRILKNSTEMENLRNILLLSYYDLPARLKTCLLYLSIFPEDCEIGMHRLIWRWIAEGFFNGELAHDGLFNLGESCFHELIRRSMVQPVTLEGTGLVYACRVHNMFHDLILYMSHEEEFVSAVNEKFGLLDVRSRRLAFQNITKEQYRLVEHPRLAQLRSLNAIGCPIYAIPPIESYKLLRVLDFENCAGIEGHDLVHLGKLHHLKFLGLRNTFIGKLPEGIGNLKFLQTLDLDGTGVEELPQALHNLTELMCLIADWRTRVPNWIGNLTSLQHLVIYPGGHDDEDSASRGVQLEPEGYALSRHIRSMELRWLEFSRLPLWINPGHLPNLYHLWLMVSEAEERDLEILGGFPVLHSLHLLIVNTEREDVMTCGCGGFKNLKCCSITKPLKFVHGAIEVLDFHFSVQLLTDSNQDFDFDFGLGNLHWLQQAIVQITALGEEVESVGRAQVALRDAIRTHPNRPTLEINLFGQTIPPELPKQDDDGAKIVEISPAESSRQAQEREKRSIDVATKKATRVPSFYTKSSIDEPMDQLINMLSVVDDEAYTKNIKILSIVRSEGLGKTTLAQKAFEELHSQFDRGAFVLLGQNPDLRRVFADILRGLDKQRYIDFPVAILDLVDLIWLVRKSLINKRFFIVFDDICDVKAWEIIKCALIENNNHSVVLTTSRNTGITEIIGGSKQLQPLSATISKNLLCKRLFGSAGKCPSELVNICDNLVEECGGILSVIDETVTLLASIPPTVENWEAVYARRMLDRSYPGLTDSLKNCLLYFTMFRRGHEISGEHLICAWIAEGFVHGQEVAETYLSDLVKKKLIDAVEVDAGGKVLTCRMYDLVHDFIVSKSIEERFVYILNDSEGRDLSEAVHVHQRLYIQGHNNKELDLQIPWLPQVKSLVSCGTAPSILKFKGLHVMDLGACESLQASHLKGINNVSSLRYLVIGGKCISGIPKEIAKLEHLRTLDLSASGLNELPEYVFMIRKLERLIVNSQMKISYGIAKMSALQELGDINVTDPELLKSLCKLTKLRVLRISIWSWDDSLKNYFKQLCDNLRSLVQCTENIQSLSIMTCCSLVFMDDLGENWTPQCLQKLEVGCSAFDILPSWFGSLSSIFTLTIEVYKLSQDIIDTLGRLPGLGSLSLTSKQEPKGYFVIGSDRFSKLESLKFVSNAMVEMFPRQQSNGTEQLKRLMIVFHASRTQDVNKDFCFGLENLSSLEHVRVEIICFDASHNMVKNAEAAVRKAISGTSIPNLEIRRLQENSMIQDEADLCDAVQEQNNQKHQKMKRY

SEQ ID NO: 233 - DNA, 5422 bp, Zea mays
atggcgcccaagcttcctgtgctacgacaagcaaggtggctgccgctgctttttcttattaccaactttgttgtgctgcagttacaatgctcctatgggcttccgctccagaatgaaccgagacaagtaagctagctctgttttttcccctttccttgtgatcttggtttggtcaccttcatgcatcttggtactaccgccggcaaaatgccatgcttcagcacccccactcctccaaaaaagtaaaactacactaaagtaacggaagttattttcgacagtagcacggggcgactcggcatccgaccgtggcggcgcgtgcacgggaatcagagagagagggaagagaaagggagaacacaaccgtataaatgagttatttttcgacggctagagttacgagtgtcgaaaattatatctatttttagtggttagaggacagccgtcgaaaataatcaaagtcaccaaaaataataaaagctgccgaaaataacatattatttttaacggtagttctctgagcgccgaaaataactgtcactcttgttgtgctaataagatggaaagaaaaataccttttgattcttttattggttttgttactaattttacggtagtgggaatcgatgtgcgttggcggtctcttacctcaaatcaagcagtgggacgaaaaatacaaagtatactagactgtgagtattaaaaaacaaaaagaaaaatttattttaaaataaagaattcacaaccattatcggaatctagctccgagtgctttctatcaggcactcgacaaagtcctactcttggtaacgaccacgtttaccgaaagcaggactctcgacatagagaaacactcggcaaggaacgctttgccgagtgccgaacactcgacgaacagagacgatgtacagttcgccgagctttctttgccgaatgttgtcacactcggcaaagccttcgccgaatgttttacagacttcagacactcggcaaagaaattgtttcgggtagtgaatatgattacattatatcaattggtttctctattgtctaccacctgggaaacactttttcagctccattctgtgcaaaagttgaccaaagagctccatgaaatcattgtagcaggtttgaaccgattgttcaagtcacgagtacaataatatacatagccaaaggcacacccaatttagctttaatttataaaatcgcctgagtagtatggacgtggatagcaccagtttttctagtttgtagggaaaaatataaactaacagccaagaaattaattcatatgagcatcttttcgacgactatcttgagtagtttctagggactgacacttagctactattttttccatccaaccaggtaaaacgaagaatatatataccataaattatttgataaaatgaacctatgtccaagaagcaataaaatatgtggagttatttcttacatgattaacttaattactttcgatatgtttaactctaaaaattacttctatgtgtgattattagctaacttacgtgatggaaacatgcacataccgaacagatatacttccatgcatgtgtcacgtttttaagaaccataagtgttaggagtcgatagaaataattatttttacagacgagtaaattagaatcgctagtggaaatcgattttcactggtggttgatataataaaaccttcaataataatttttttaggattcataagcgaggttttaaaatcgcaaaaaaatattataattaagggaagcctcacccaagtttggtccattgaagttgaaagtcatggtatttttcgcgtgctacgtggtgggtgggaatcaaacttgcgaccttagcctcacacataccgtacgttaccactctactcatcaattacttcatgtttatatggtagttttgttgggcatatattataatcaactgtgtgtaaattgattatttcagtccgtaaagaaatttaaacaaaaaagttgttttgaagttcaataacttttattttagtacttttcacatctgaggtcgtttgcaaaatttctattttaaatttgaaaaatttagatacactttttgaaaacccaaaatgatttcaaataaaaaaacaattaactacaaagttttataacttttagagatctacaacttttatttcggtagtattccatataaggtcatttggaaataacaaaaaattcaggatataaatgatttgtagtagcagttacttagtaattcgtctataaaatcatggatttttagtaaaaatgatttttaaagacggttttcttaataaattaaaacactagtacaagcattactggcgtttaatatccgaaaccgccgtgtgagatacataaaaaatattatgcattccatggcggcagaatcaacaaattgcgtttacagcttgtctatactgacgaggggttgatggtgtgtgtgtgtgtttcagatatacatcgtctaccttggtgggcgacaaagtgacgatgctgatcttgtcactgcttcccaccatgacctccttgcgtctgttgtcggcaggtaattaactctatatacaaattgatataaacccaagttttaatgcatataaactacttgtctgtacgtgcattctgaagcaagcaagaagcggtagagtcgattatctacagctatagacatggattctccggcttcgctgctttgctcacgaaatcacagtctatacagattgcaggtactgataaatatatataaaaaaagatatatattttctacacatatcatcatgtttaatgttttctgctggcaggtctgcctggcgtggttagtgtaacgaaaaaccgagtccaccagacacgcacaactcgaagctgggactttgtggggctgcactacaacgatcagccaaacggtttgctcgcaaaggcggctaaatacggagacgacgtcattgtcggcgtcatcgactcaggcttctggccagagtcgcctagctacgctgaccacggctacggcccccctccttcgcgatggaagggagtctgccaaggcggcgacgacggctcgttcggcccgaataactgcaaccgcaaggtcataggggcgcggtggtacgctgccggcgtgagcgacgacaaggagaggctcaagggcgagtacatgtcccccagggacgccgaaggccacggaacccacacctcctccacggcggccggcaacgtcgtcggcaacgtcagcttccacgggctggcggccggcgcggcgcgaggcggcgcgcctcgcgccaggctcgctatttacaaggcctgctggggcgcgcccccgttgtcgggctcgtgcgacgacgccgatgtgatgaaggccatggacgatgccgtccacgatggcgttgacgtcctctcggtctctatcggcgggccctctgagacgccgggcacgttgcatgtcgtcgcgagtggggtcacggttgtctacgccgctgggaatgatgggcctgtcgcccagatggtggagaactcgtccccgtggctgttcaccgtcgccgcaacgactgtggataggatgttccccacagccatcaccctgggaaacaaccagattgtgcatggtacgtgcatacactagctagattctatgatgttatcttaggagtttgtccatatttgacaaccaattaacatcgcgcacaagtcgctgatgattttttttaaggtcaatccttatacgtggggacgcaagggagagaagatcatttccacgaggtcgtgcccatggtgaactcagggtatatatgattgattcgtacactaaccaatgtcaattattcaccaacgaattgttcatgtgttaaataaaactgagaataatatgtcaatgaatatttggcatacatataataatgagtattgaaacgtcggtgtatatacatacagttgtgatccagagtatgtaaacagcagcgatgtgaaggggaagattgtcttctgcatcacagaggacagcttgaatccatctgctacagttactgctgttggacagctagtgttggagaatggagggaaagggttcatattcacgggatataacagggacaatatcgttcggtgggaacctgttacaagcaaaatgataccgttcattttaatcgatcttgaggtcgcctaccacatcttgcagtactgcatgtacgtacgtaaacactgatcgattaacatatattacatcgatgctggttaattatatcacattttttatatttttttttatttcgatgcaccacaccactaaactaatcctctgaagcagctcaactgacggtaccccaagagcaaagatctctttggctcaaacaacttttggaactggggttcctgcccccaaggtagcagtgttctcgtctagaggacctagtgccgtctatccaggcgttcttaaggtaccctagctaccttctatatataattctctgtcttggcattcatcccatccatttcttctacaacaatcctcttcaaactaacattattgtttccatgcatacacatgaataatattcaacagcctgatatagctgcacctggggtgaacatcttagctgccgccccacaaattccttattacaaagagcagctgggtggcgtcctgtaccattttgagtctggaacatccatggctacccctcatgtgtctggtatcgtcgccctgcttaaatcattgcatcctgactggtcacctgcggccctcaaatcggcgctcatgacaactggtatgtgtattaaataatctcgccttgctagcttaaacaaccatgtccaatacaagcattgtcttaaacaacattgttattgtccccctgcatgcagcacttaccaccgacaacaacgggatcccgatacaagcagatggaaacccagtaaagatcgccgacgctttcgattacggagcagggtttgtcaacccaaccaaggctgacgatcccggtctcatatacgacatccaaccgtcagattacctcaggttcttcgactgcacgggagggttgggtaccaacgacagctgcacgacacctagggcatctgttgtagacctcaaccttccgtcgatcgcaatccctagtctcaaggcgccccaaaccgtcacgcgcaccgtcaccaacgttgggcgccagactaacgcagtgtacagagcagtcctccagccgcctccgggcgtggagatgtccgttgaaccgtcggtcttggtcttcgatgccaagaggaaagcacagagcttcaaggtggctttcatggcgacgcgtcggttccagggtgactacaccttcggtagcttggcatggcacgacggaggcagccactgggttcggatcccgattgcggtccgcatcgtaatccaggatttgtattcgaccgtctcttga

SEQ ID NO: 234 - DNA, 2328 bp, Artificial Sequence
  cDNA of Zm00001d037651 - NC262A genotype
atggcgcccaagcttcctgtgctacgacaagcaaggtggctgccgctgctttttcttattaccaactttgttgtgctgcagttacaatgctcctatgggcttccgctccagaatgaaccgagacaaatatacatcgtctaccttggtgggcgacaaagtgacgatgctgatcttgtcactgcttcccaccatgacctccttgcgtctgttgtcggcagcaagcaagaagcggtagagtcgattatctacagctatagacatggattctccggcttcgctgctttgctcacgaaatcacagtctatacagattgcaggtctgcctggcgtggttagtgtaacgaaaaaccgagtccaccagacacgcacaactcgaagctgggactttgtggggctgcactacaacgatcagccaaacggtttgctcgcaaaggcggctaaatacggagacgacgtcattgtcggcgtcatcgactcaggcttctggccagagtcgcctagctacgctgaccacggctacggcccccctccttcgcgatggaagggagtctgccaaggcggcgacgacggctcgttcggcccgaataactgcaaccgcaaggtcataggggcgcggtggtacgctgccggcgtgagcgacgacaaggagaggctcaagggcgagtacatgtcccccagggacgccgaaggccacggaacccacacctcctccacggcggccggcaacgtcgtcggcaacgtcagcttccacgggctggcggccggcgcggcgcgaggcggcgcgcctcgcgccaggctcgctatttacaaggcctgctggggcgcgcccccgttgtcgggctcgtgcgacgacgccgatgtgatgaaggccatggacgatgccgtccacgatggcgttgacgtcctctcggtctctatcggcgggccctctgagacgccgggcacgttgcatgtcgtcgcgagtggggtcacggttgtctacgccgctgggaatgatgggcctgtcgcccagatggtggagaactcgtccccgtggctgttcaccgtcgccgcaacgactgtggataggatgttccccacagccatcaccctgggaaacaaccagattgtgcatggtcaatccttatacgtggggacgcaagggagagaagatcatttccacgaggtcgtgcccatggtgaactcaggttgtgatccagagtatgtaaacagcagcgatgtgaaggggaagattgtcttctgcatcacagaggacagcttgaatccatctgctacagttactgctgttggacagctagtgttggagaatggagggaaagggttcatattcacgggatataacagggacaatatcgttcggtgggaacctgttacaagcaaaatgataccgttcattttaatcgatcttgaggtcgcctaccacatcttgcagtactgcatctcaactgacggtaccccaagagcaaagatctctttggctcaaacaacttttggaactggggttcctgcccccaaggtagcagtgttctcgtctagaggacctagtgccgtctatccaggcgttcttaagcctgatatagctgcacctggggtgaacatcttagctgccgccccacaaattccttattacaaagagcagctgggtggcgtcctgtaccattttgagtctggaacatccatggctacccctcatgtgtctggtatcgtcgccctgcttaaatcattgcatcctgactggtcacctgcggccctcaaatcggcgctcatgacaactgcacttaccaccgacaacaacgggatcccgatacaagcagatggaaacccagtaaagatcgccgacgctttcgattacggagcagggtttgtcaacccaaccaaggctgacgatcccggtctcatatacgacatccaaccgtcagattacctcaggttcttcgactgcacgggagggttgggtaccaacgacagctgcacgacacctagggcatctgttgtagacctcaaccttccgtcgatcgcaatccctagtctcaaggcgccccaaaccgtcacgcgcaccgtcaccaacgttgggcgccagactaacgcagtgtacagagcagtcctccagccgcctccgggcgtggagatgtccgttgaaccgtcggtcttggtcttcgatgccaagaggaaagcacagagcttcaaggtggctttcatggcgacgcgtcggttccagggtgactacaccttcggtagcttggcatggcacgacggaggcagccactgggttcggatcccgattgcggtccgcatcgtaatccaggatttgtattcgaccgtctcttga

SEQ ID NO: 235 - protein, 775 aa, Zea mays
MAPKLPVLRQARWLPLLFLITNFVVLQLQCSYGLPLQNEPRQIYIVYLGGRQSDDADLVTASHHDLLASVVGSKQEAVESIIYSYRHGFSGFAALLTKSQSIQIAGLPGVVSVTKNRVHQTRTTRSWDFVGLHYNDQPNGLLAKAAKYGDDVIVGVIDSGFWPESPSYADHGYGPPPSRWKGVCQGGDDGSFGPNNCNRKVIGARWYAAGVSDDKERLKGEYMSPRDAEGHGTHTSSTAAGNVVGNVSFHGLAAGAARGGAPRARLAIYKACWGAPPLSGSCDDADVMKAMDDAVHDGVDVLSVSIGGPSETPGTLHVVASGVTVVYAAGNDGPVAQMVENSSPWLFTVAATTVDRMFPTAITLGNNQIVHGQSLYVGTQGREDHFHEVVPMVNSGCDPEYVNSSDVKGKIVFCITEDSLNPSATVTAVGQLVLENGGKGFIFTGYNRDNIVRWEPVTSKMIPFILIDLEVAYHILQYCISTDGTPRAKISLAQTTFGTGVPAPKVAVFSSRGPSAVYPGVLKPDIAAPGVNILAAAPQIPYYKEQLGGVLYHFESGTSMATPHVSGIVALLKSLHPDWSPAALKSALMTTALTTDNNGIPIQADGNPVKIADAFDYGAGFVNPTKADDPGLIYDIQPSDYLRFFDCTGGLGTNDSCTTPRASVVDLNLPSIAIPSLKAPQTVTRTVTNVGRQTNAVYRAVLQPPPGVEMSVEPSVLVFDAKRKAQSFKVAFMATRRFQGDYTFGSLAWHDGGSHWVRIPIAVRIVIQDLYSTVS

SEQ ID NO: 236 - DNA, 957 bp, Zea mays
atgtcgttcggtcgccgttcatggcaaatcctcgccctatccatgcccatggtgctcctctccttcgtcgctgccacggccgtgtccaagcggaccggcgagctaacggtgttctggggccggaacaaggaggagggcactctgcgagaggcttgcgacacagggctgtacaacacggtcatcatctccttctacagcgtcctcggccgtggaagctacggggtagacctctcaggccatccgctggacggcgtcggcaccgacatcaagcgctgccagtccaagggaatcccggtcttcctctccatcggcagcggcggcggaggcaacggctactccctctcgtcctccgagtcggcggtagccgtcgcggacaacctctggaacgcgtacctcggcggcggccgcagcgacgtgccccgcccattcggcgacaccgtggtcgacggcatcgatttctacatcgacaaccaccagggtgcccccgacgacctctacgacgagcttgccagacgcctcgacggctacaacagccaagccagcgtgaggaagcgggtgaggctgacggcgacgccgcggtgcgcgttgccgcaagggcgcctggagacggcgatgcagacgggattgttcgagcgcatccacgtccgcttctacggcgacgacgagtgcacccacagcaacggtgccgtcgacaagcactgggacaagtgggcggcgaggtaccccggcagccagctgtacgtggggctcgccgcggcggagagcggcgtgccagaaggcgcggcgccacccgtcgaggtctacctcaaatacctctactacagtctgctgcccaaggtgcagtcggcgcccaactatggtggcatcatggtctgggacaggttcagtgacaagaaaaccagctacagcagcgctgtcaagggctgggcgtcatgcagctattctgggtgtgtttaa

SEQ ID NO: 237 - DNA, 957 bp, Artificial Sequence; identical to SEQ ID NO: 236
  cDNA of Zm00001d037653 - NC262A genotype

SEQ ID NO: 238 - protein, 318 aa, Zea mays
MSFGRRSWQILALSMPMVLLSFVAATAVSKRTGELTVFWGRNKEEGTLREACDTGLYNTVIISFYSVLGRGSYGVDLSGHPLDGVGTDIKRCQSKGIPVFLSIGSGGGGNGYSLSSSESAVAVADNLWNAYLGGGRSDVPRPFGDTVVDGIDFYIDNHQGAPDDLYDELARRLDGYNSQASVRKRVRLTATPRCALPQGRLETAMQTGLFERIHVRFYGDDECTHSNGAVDKHWDKWAARYPGSQLYVGLAAAESGVPEGAAPPVEVYLKYLYYSLLPKVQSAPNYGGIMVWDRFSDKKTSYSSAVKGWASCSYSGCV

SEQ ID NO: 239 - DNA, 2130 bp, Zea mays
atggattccgcgcccggccccgctccccgctccacacctgtttgctcctcagacaattcaggaactgtaaaagcttgggtgatcgtggccgtcgtcggcctgttcgccttgcacgtcctgggttcgctacgccggcggtccagcaacagcctcctccacgctacagtgatggcagtctccacactctcctactcgctagtgggctacatcgttggggagatgcgtcgctcggatttctactactacgacttcgccgtgtgggcagtgttcgtgcttctgctcctcggcagcacggacagcctcacggcctgccgcctcgacgacatcgacgactggaggagcatctacgtgaaacacctctacaaggcatccttggtggtcattgtcattgtatacaccatcggcggcaatagggataccaagtacctgtggtggccactggccgccttcctgtttgtcggcgttgtcaagtgctacgtgaggatcgcttccatgaggatggtgagcaagtcctacctgtgcagggaggtgaaggtgattgctgaatacatgcagcacaaggacaacctgctggcgcccttcgatcccgtcaccatgcaaggctacagttacattgtcgatggcgagaagtactgcgtcgtcgccaagaagcagtctgctgatgggcgcacaccatggtaccacatgaacagtaatgttaccacggtggagcaggtctggcagtgcactggcagactgctgcaccttggcaaacggggcaagctgctcaaggacttgtgcctctccatggcgctatccaagatgctcaacagaaggtttgctggcttcgagctctcagagtcccaccttgagaaaacccatgacttggttttcaaaggcctcctcgccggggacgacgacgacccacatgagagagccttcagggtcatcgaggaagagctagcttttatccatgacttgtactacacaaggtactattacctccaccaaaagggacgatacatggctctctgtccacccgtcgtcatgtttgccctatgctcatggctcacctacgtgctcatcaagaactacgaccgctctcttaatatcaccgtattcataacggtcgtcttggcattcctggagttataccagctctacttgtacatagcctctggttggttcaaggtggcgctgatactgagctacatctccacaccatcctcgcaaagaaacggttgctgccttgagatgatcatcggccgcctcgtgaggttgaaggcgattcagccgtggaaggatacacttgggcagtactgtctcctccaggacttgggccgcagaagcagctggtttagggattgttgtttccattatgctactctgggtcttatggacaaggccccggcccggaaaaagaagaaggggcgaaagagctcagtcaagctgtccaaaaatgttaagaaagccatagctgagtccctactgggaagcaacggctacctcaccaatggggtgacatcgctacaaaacaatggcgtacatgctcggctcgcatgggcatgtgatgctagttccacccaaggatcggtgactcgaacaatacttgtctggcacgttgctaccaccctgtgctggcagctagacgatgcagcacaagccaaggacgaagaagtcgcagccacgacggcctccactttgtcggagtactgcatgcacctccttgctttcgcaccaaggttcttgcccgaccacagcgctatatcggaatccatactggaacagtcagtcgacgaagcaggacagctactaaaaggggccaagaacctggagcagaggtgtaagatactcatggacagtactaccaccaatggtggtggtgcagatgatgaagaagcacccctcgtggtgcagggcgctcggcttgcgaggcatctgatggatggcatacaggaacccacattgcggtggaaggtcctctctgatttctgggcagagatggtgctgtatgtctcgccgtccgacgatgcccgagtgcacctagaagctcttgctagaggaggggagttcgtcacgcacctttgggcgctgctcacacacgccggtgtgctgaagcgaggctatacacggccattggatgtggtctga

SEQ ID NO: 240 - DNA, 2130 bp, Artificial Sequence; identical to SEQ ID NO: 239
  cDNA of Zm00001d037658 - NC262A genotype

SEQ ID NO: 241 - protein, 709 aa, Zea mays
MDSAPGPAPRSTPVCSSDNSGTVKAWVIVAVVGLFALHVLGSLRRRSSNSLLHATVMAVSTLSYSLVGYIVGEMRRSDFYYYDFAVWAVFVLLLLGSTDSLTACRLDDIDDWRSIYVKHLYKASLVVIVIVYTIGGNRDTKYLWWPLAAFLFVGVVKCYVRIASMRMVSKSYLCREVKVIAEYMQHKDNLLAPFDPVTMQGYSYIVDGEKYCVVAKKQSADGRTPWYHMNSNVTTVEQVWQCTGRLLHLGKRGKLLKDLCLSMALSKMLNRRFAGFELSESHLEKTHDLVFKGLLAGDDDDPHERAFRVIEEELAFIHDLYYTRYYYLHQKGRYMALCPPVVMFALCSWLTYVLIKNYDRSLNITVFITVVLAFLELYQLYLYIASGWFKVALILSYISTPSSQRNGCCLEMIIGRLVRLKAIQPWKDTLGQYCLLQDLGRRSSWFRDCCFHYATLGLMDKAPARKKKKGRKSSVKLSKNVKKAIAESLLGSNGYLTNGVTSLQNNGVHARLAWACDASSTQGSVTRTILVWHVATTLCWQLDDAAQAKDEEVAATTASTLSEYCMHLLAFAPRFLPDHSAISESILEQSVDEAGQLLKGAKNLEQRCKILMDSTTTNGGGADDEEAPLVVQGARLARHLMDGIQEPTLRWKVLSDFWAEMVLYVSPSDDARVHLEALARGGEFVTHLWALLTHAGVLKRGYTRPLDVV

SEQ ID NO: 242 - DNA, 2411 bp, Zea mays
atgcagagcatgtcggcgtcctgctcggccgccgtctccgtctctacctctagagtctgggccgcggcgcgccgctcgccctcgccccgatccctaccctcgttgcgccacgtcgccttctggccctctccatcctcctcctacccctcttcttctcatggctgtcgctggccgatcgccggcgccggcgcaccggcgctcccgctcggcattcgcgggggcctgcgccggctgccctcgcctctgcttgcgccggacgcccccagtgccggagcggcggcgaggacgcgggcggccgcggccgcggcgtctccggcagcggccggtaagcaggagggcgccgccggcatttcgcagaccctgcaactcgggacaatgatcctcgtctggtacctcctcaacatctacttcaacatctacaacaagctggtccgccgtttcgtcctgttccccaagtcttttcgtaatggggttgcgcaaccaaatgggatcttctaattaaattctttcgaaaattgcgagttgggcaggttctgaaagccatacctttcccttacaccatcaccaccttccatttcgcatccggaaccttcttcatcacactcatgtggctgctcaatctgcatcccaaaccgaggctctccctcaaacaggtactccttccgtttcaaagacgttttggcctttttttatctaatatatttatagatacatactatgaatagaaatgacaaaaacgtcttataattataatttggtacggaggaagtaataaacaaaaaagattgactaaactgcaccaatgtaaagctggttcactcgtgtaactgatgcaatgcagtatgcaaagctcctgcctttggccttgatccacatgcttggaaatgttttcaccaatatgagtttgggtaaggtgtctgtctccttcacccacaccatcaaggccatggagcccttcttctcggtcctcctctctatcctattcctaggagaggtaattggttggttcacacctttgctagattatttgtcctcaaaggtggaatccttcatataaacatctgtttctgtattctgtctctacagacaccttctctaccagtgttgggttcacttgtccctattgttggcggagttgtattggcgtcgatgactgaagtttcattcaactggtaatttattgctttaaagcgtcaaagaatttactcaaagcaatattgtgtatttgattctaatattaggagaaaacaggattggattctggagtgccatgacttcgaatcttatgaatcaatcgcggaacgtttacagcaagaaaattctcgctgataaagaggtgagccttttgcgcttataatgtttccctaactgtaggtccacaacagttcagcatgatatatgctgtgaagtgtgaacactacaccgcctaactggacttgttcttattacaggacagtttggatgacataaatctcttctcaataataactgtcatggcattcttgttatctgctccactgatgctatgtgtagaaggaatcaagtttagcccatcatatctacagaatgctgtaagtgtggccagcatgaaaaacaagaaattttggaatatttcaacactttactgacatgaaattgctgaatactaaactttctgggttttcagggagttaatgtaaaagaattatttataagagcggcacttgctgggacatctttctatttttaccaacaggtgaggccagtctgtctccgctcaaaacattttttgtagtctctcggaggttgctaaaattgtctgttagtggctactgcggttggctacttaggtccaaacaaactacttactacttgcttgcagataatatatatgtttgtccattgttttattgctaggatcaggccattccagttaaatatgatattatctccagttatgttgaacaatttttcagttctcctgtgtcatcattcatgaaaaatattgaatatcagtttttttagcctaaaaagtactccatccgtctcaaaatagtagtcgttttagatcttggtttttatgtctatattcaaatggatgatgataaatcaacacaaatagagaaaacaaatgcatcaaaaattgtataaactcattaattttcctcattagtgtctatcagttttttggactatctcgtatcttcatccgttctcttctttagaactttaatttcacctataaatgccttaggtacagaagtgattaatattcttcatgcaagtgccagttacttaccatctcatcagtgtctgaattgtaagttttcttctttgcctgcaggaaccggtgttgctcttgctggagtgttcctgtactcgcagttcaaaaagtcaaaaccaaaggctacggctgcatgaagagactatag

SEQ ID NO: 243 - DNA, 1248 bp, Artificial Sequence
  cDNA of Zm00001d037659 - NC262A genotype
atgcagagcatgtcggcgtcctgctcggccgccgtctccgtctctacctctagagtctgggccgcggcgcgccgctcgccctcgccccgatccctaccctcgttgcgccacgtcgccttctggccctctccatcctcctcctacccctcttcttctcatggctgtcgctggccgatcgccggcgccggcgcaccggcgctcccgctcggcattcgcgggggcctgcgccggctgccctcgcctctgcttgcgccggacgcccccagtgccggagcggcggcgaggacgcgggcggccgcggccgcggcgtctccggcagcggccggtaagcaggagggcgccgccggcatttcgcagaccctgcaactcgggacaatgatcctcgtctggtacctcctcaacatctacttcaacatctacaacaagctggttctgaaagccatacctttcccttacaccatcaccaccttccatttcgcatccggaaccttcttcatcacactcatgtggctgctcaatctgcatcccaaaccgaggctctccctcaaacagtatgcaaagctcctgcctttggccttgatccacatgcttggaaatgttttcaccaatatgagtttgggtaaggtgtctgtctccttcacccacaccatcaaggccatggagcccttcttctcggtcctcctctctatcctattcctaggagagacaccttctctaccagtgttgggttcacttgtccctattgttggcggagttgtattggcgtcgatgactgaagtttcattcaactggattggattctggagtgccatgacttcgaatcttatgaatcaatcgcggaacgtttacagcaagaaaattctcgctgataaagaggacagtttggatgacataaatctcttctcaataataactgtcatggcattcttgttatctgctccactgatgctatgtgtagaaggaatcaagtttagcccatcatatctacagaatgctggagttaatgtaaaagaattatttataagagcggcacttgctgggacatctttctatttttaccaacaggtgaggccagtctgtctccgctcaaaacattttttgtattttttggactatctcgtatcttcatccgttctcttctttagaactttaatttcacctataaatgccttaggaaccggtgttgctcttgctggagtgttcctgtactcgcagttcaaaaagtcaaaaccaaaggctacggctgca

SEQ ID NO: 244 - protein, 416 aa, Zea mays
MQSMSASCSAAVSVSTSRVWAAARRSPSPRSLPSLRHVAFWPSPSSSYPSSSHGCRWPIAGAGAPALPLGIRGGLRRLPSPLLAPDAPSAGAAARTRAAAAAASPAAAGKQEGAAGISQTLQLGTMILVWYLLNIYFNIYNKLVLKAIPFPYTITTFHFASGTFFITLMWLLNLHPKPRLSLKQYAKLLPLALIHMLGNVFTNMSLGKVSVSFTHTIKAMEPFFSVLLSILFLGETPSLPVLGSLVPIVGGVVLASMTEVSFNWIGFWSAMTSNLMNQSRNVYSKKILADKEDSLDDINLFSIITVMAFLLSAPLMLCVEGIKFSPSYLQNAGVNVKELFIRAALAGTSFYFYQQVRPVCLRSKHFLYFLDYLVSSSVLFFRTLISPINALGTGVALAGVFLYSQFKKSKPKATAA

SEQ ID NO: 245 - DNA, 3486 bp, Zea mays
atggcatggcgggcgagcctgtctcggagcctaaaggagatccgcgtcctcttctgtcagtcctccccggccagcgccgccgcccggtacaaatctcacgcatcttcgatttcactctctaaagtcgctgcttctgatttggtgcgttggtgatctggtcgcccccagtgagttcgtgaagaagaactatggtgacatcaaggctcgcaacccctccctccccttccttgtccgcgagtgctccggtgtccagccccagctctgggcgcgctacggtacgcgtccatccatttcttctgtctcctgctgtagctgaagatctgattttaactggttggggccgtttcttgggtggatttcatatatctgtctgccgtgtggaatggctcaatctgtactgccggatcttgccgttggcgacgtgcatttgagggaagaggaatttaggcgattagattatgagaaataagtgtataaatgcaagccacatgttggtttgtcatactcaactactgtacaaatctgctagtttgcgtgatgataacctgttgggcccagtcgatacgtttacatgtgccctgcatcagcatcctggtcaatcacaatggtctcgtaccagcattttattcaatttaggggtgccttgtggtcttatgtgttgttcaattttattgtagaatagagacaatgctcaactttacaggcatggccagactgttcctccacagacagtatcttgtattccctccattcgaaagtatatatggcattagatttgtcttaagtcaaactgctttttattcgactgagtttatggaaatatgcaccaacatctacaacaccagattagatcattaaattcgccatgaaatatgtttttgatagttaattattgaacctgtagatgttattcctaaatgtttggtcagtttacataagtttgacacaggataaagcaaaaatgatctataatttggaatggaaggagtaatttgtattttgttaatctcaactggcttacctgcaggtgctgattttatatattaatgacactgatttaatttcatagccatattgcagttcatgtagcaaagaaaatatcatgaagtttgctcttaaaagttttagcatactattaccataagcacatatggaaccaggaacaatttggaaagatgtaggattagtatcacgatctcaccttctaaattcagtaatttactaatgtcttctcaggatccatgtcctgagcattagatttccagggaactagattttatgcttctcagctagataatatggaataacctctgtctatggtaccaactttatcttattttggcagataagtaactcgtaggcttcactaatcagtggtgttagaaactagatcatcaatatgcattaaagacattgcttttattagattattgattctattttttctgtgtccactattttagctgaatgaaagtggagagccattaacccatcattatacaaggcaatattttgtcatgtttaagaattttgtttaacaaatgcacactatatatttcagtgtgtcattatttcaaaacttctaggcgctaggcaagcttgggcgaaggggttctgcctagcacttgggcactcctaggcgttgcctaggcatttcttttggtttagcttttttctgaccagcttttctgagaatctggttgtgaggagaatctagctgtgtagagaatctagctgagaagaatctagctgtgtagagaatctaagtatcattaggattacgtgcggagaaagataaaggtgtccatagggctcaggatctagaaagtgacggatttatactattgcaacgactcaaccgattatgtgtttatgttgattttgattggtttttacccaaacgaattttatagaagctggttgaaaagctgagcgtttggtagtccgcagcagcttttggtggccagaagctgtaaaaaactgaaacaaacaggggctatgggtagtttgcctattcccatggcaaataaagaaacttttgcatatctgaacaaaaactgatattatcatgcatacttaagtaatataattgtagttcatgtttttccatttctgcgtcaggttcatcagataagtgttgtggaaatgcatatgttgcgtttgatttgtagctatacaagaagagatcagattcagaatgatgatatacgtgattggctaggggtagcaccaattaaagaaaagcttgtctaacaatggttgagatgatttgtacatgtccaacggagacctctagagacatcagtgtataatgggatcctatggcgcgatagtaatgggaagagagacataggaaggccgaagttgacatgaaaaaaagagacagtaaaaggagactttaatggatgggatatacccaaatattttgttttgagcaaatggaacatatctatccacatacctaaattttgatttgtggcttctgtaaggttttagtttgagcctacaccaacttacttgggaccaaaagactttgttgtgttgttgctgttgttgttgttgtgctgtttctcaatctctaatttgcctcattttcatacatatatcaaactcaaagtatctctacatgggaaatgcctaaattaaaagctgggcaaggcggtgcagctctacctagagcataggtggttctaggcgtcacctttctaagcaaaatatgtggacatcgatgcggttttaattaactggatatatgttaaggaaataatttgtactttgtaacattatcaataattttatctcttgaatccaatttatactaggatggattatgtttgaggatgaagatttatgttatcaatggttcacaaaggtgaaaccttgtttccatatagtttcagcggctcaactgttgtcaaacctttatgtttgttattacactttacatagcaccaggaatgagggcattctcatgggaaggcccacgttgacctaacttgtcactataaataaataactccggtgtaccctagatacttaggggaaattggtaaattggttgctgactttgttgtcctggcccgtggaatctggtttttatttttccaacgaagagcacgacctccctgtttctcctgtattgagtgaaacacaaacacagaacctaacgaagattaagtgatgaatcttcacttgttatcagacaatgtatggatattgcatattgaatattgcattctaccttcaactaaagaatatgttctttatatgtaaagaactagagcatatgttttctgtattgtgtatctacaagattatcattcactaagtgtttggccctaatggtgtccttttattctactctactgtctactgtcagatatgggtgtggagagatgcgtgaacttggatggcctgacggaagcacagattgataaaaagctggaggagcttgccaaggccggcgagtctcttaaaaccaaatag

SEQ ID NO: 246 - DNA, 300 bp, Artificial Sequence; identical to SEQ ID NO: 192
  cDNA of Zm00001d037663 - NC262A genotype

SEQ ID NO: 247 - protein, 99 aa, Zea mays; identical to SEQ ID NO: 193

SEQ ID NO: 248 - DNA, 2914 bp, Zea mays
atggctatcaaacagagcatcagcttcacgctgcgtgttcttgctgatctatccctcctgctcttttgcgtcctgcttgcacctgtatgttcagccacaccggccacagctcctgctgttctcctgcaagtgaagtccggcctcactgaccccggaggcgtcctctctggctggtcactggaggccgacgtgtgctcatggcatggtattacgtgcctgcccgggaaggtctcaccgggcattgtgacaggcctcaacttgtccgggcacggcctgtcaggcgtcataccgccggcgatgagtggcctcatctccatcgagtccattgacttgtcctccaattccctcaccgggtcgatcccgccagagcttggcgcgctggagaacctgaggacgctgctcctcttctccaactccctcagcggcaccatcccgccggagctcggccttctcaagaacctcaaggtgctcaggatcggcgacaacgggctgcacggcgagatcccgccgcacctgggcaactgctcggagctggagacgctcggcctggcctactgccagctgaatggcaccattcctgctgagctcggcaacctgaagcggttgcagaagctggcccttgacaacaacgccctcaccggtggcatcccggagcagctcgctggctgcgtaagcttgcgctttctgtcagtgtctgataacatgctgcaaggcaacattccttcgtttgttggaagcttcagtgatctccagtcactcaatttagcaaacaaccagttctccggtgggattccggcggagatcggcaacctttccagcttgacatacctcaacctgctcggtaacagcctcaccattccggcagagctgaaccggctgggtcagctgcaggttctggacctgtcagttaacaacatttctggaaaggtcagcatctctgcagcacaactgaagaacctcaagtaccttgtgctgtctggcaatctccttgatggcgccatccctgaagacctctgcaccggcgactcatcaagcctgctggagaacctattcctcgctggcaacaatcttgaaggcggcattgaggcgctgctcagctgcactgctctccagtccatcgatgtgtcaaacaacagctttaccggagtgatacccccgggcattgaccgcctgcctggcctcatcaaccttgctctgcacaacaacagcttcaccggcgccctgccgccgcagatagggagcctgagcaacctggaggtcctgtctctgttccacaatggcctcaccggtggaataccgccggagatcggcaggcttcagaagctgaagctcttgttcctctacgagaaccagatgtccggaaccatccccgacgagctcaccaactgcacgagcttggaagaggtggacttcttcggcaaccacttccatggtcctattcccgaaaggatcgggaacctcaagaacttgaccgtgcttcagctccggcagaatgacctgtcgggccccattccggcgagcctcggcgagtgcaggagccttcaggcgctggcattggcagacaaccggcttaccggctcgttgcccgagacgttcgggcagctcgccgagctcagcgtgataactctctacaacaactccctcgcggggcccctgccggagtcgctgttccagctcaagaacctgaccgtgatcaacttctcccacaaccagttcaccgacagcatcgtgcctcttctcggctcgacctccctcgccgtgctggcgctcaccgacaacagcttctccggcgtcatcccagcagtggtcgcccgatcaaggaacatggtccggctccagcttggcggcaaccggctcaccggcgcgatacctgccgaactaggcaatctgacaaggctcagcatgcttgacctttcgctcaacaagctctccagcgacattccggcagagctctccaactgcgttcagctcgcccatctgaagctcgacgggaacagcctgacgggcaccgtccctgcatggctcggcagcctcaggtcgctcggcgagctcgacctctcgtggaacgcgttgactggaggcatcccgccggagctaggcaactgctcaggcctgctgaagctgtccctcagtgacaaccacctcaccggaagcatcccgccggagatcggcaggctgacgtctctgaacgttctgaacctgaacaagaacagcctcaccggcgccataccgccagcgttgcaccaatgcgacaagctgtacgagctgagactgtcggagaactcgctggagggaccaatcccgccggagctcgggcagctctcggagctgcaggtgatacttgacctgagccggaacaggctctccggcaagatcccggcgtctctcggcggactcgtgaagctggagcggctgaacctgtcatccaaccggctggatgggcagataccgtcctcgctgcagcagctgacgagcctgcatcgcctgaacctatccgacaaccacctctcaggcgcggtgcccgcggagctatcgggcttcccggcggcgtcgttcgtcggcaacgagctctgcgccgcgcctctgcagccgtgcgggccgcggtcgcctgctactgctaggcggctgtcgggcacggaggtggtcatgatcgttgcgggcatcgccctggtctcggcggtggtgtgcgtggcgctgctgtacaccatgctgagggtgtggagcaactggcgggcggtgtcggtgtccaactccgatggcgaggagtcggcacatggtggcggcggggggaagtgggtggacggcaagtacaggaaagtggggtcatcggtgtcttggtcgtcggaacagaagcacaactcggggtccgagaccaccagcgtgctccatggcaagtccacggaggccgccggcg

SEQ ID NO: 249 - DNA, 2913 bp, Artificial Sequence
  cDNA of GSO1 - NC262A genotype
atggctatcaaacagagcatcagcttcacgctgcgtgttcttgctgatctatccctcctgctcttttgcgtcctgcttgcacctgtatgttcagccacaccggccacagctcctgctgttctcctgcaagtgaagtccggcctcactgaccccggaggcgtcctctctggctggtcactggaggccgacgtgtgctcatggcatggtattacgtgcctgcccgggaaggtctcaccgggcattgtgacaggcctcaacttgtccgggcacggcctgtcaggcgtcataccgccggcgatgagtggcctcatctccatcgagtccattgacttgtcctccaattccctcaccgggtcgatcccgccagagcttggcgcgctggagaacctgaggacgctgctcctcttctccaactccctcagcggcaccatcccgccggagctcggccttctcaagaacctcaaggtgctcaggatcggcgacaacgggctgcacggcgagatcccgccgcacctgggcaactgctcggagctggagacgctcggcctggcctactgccagctgaatggcaccattcctgctgagctcggcaacctgaagcggttgcagaagctggcccttgacaacaacgccctcaccggtggcatcccggagcagctcgctggctgcgtaagcttgcgctttctgtcagtgtctgataacatgctgcaaggcaacattccttcgtttgttggaagcttcagtgatctccagtcactcaatttagcaaacaaccagttctccggtgggattccggcggagatcggcaacctttccagcttgacatacctcaacctgctcggtaacagcctcaccattccggcagagctgaaccggctgggtcagctgcaggttctggacctgtcagttaacaacatttctggaaaggtcagcatctctgcagcacaactgaagaacctcaagtaccttgtgctgtctggcaatctccttgatggcgccatccctgaagacctctgcaccggcgactcatcaagcctgctggagaacctattcctcgctggcaacaatcttgaaggcggcattgaggcgctgctcagctgcactgctctccagtccatcgatgtgtcaaacaacagctttaccggagtgatacccccgggcattgaccgcctgcctggcctcatcaaccttgctctgcacaacaacagcttcaccggcgccctgccgccgcagatagggagcctgagcaacctggaggtcctgtctctgttccacaatggcctcaccggtggaataccgccggagatcggcaggcttcagaagctgaagctcttgttcctctacgagaaccagatgtccggaaccatccccgacgagctcaccaactgcacgagcttggaagaggtggacttcttcggcaaccacttccatggtcctattcccgaaaggatcgggaacctcaagaacttgaccgtgcttcagctccggcagaatgacctgtcgggccccattccggcgagcctcggcgagtgcaggagccttcaggcgctggcattggcagacaaccggcttaccggctcgttgcccgagacgttcgggcagctcgccgagctcagcgtgataactctctacaacaactccctcgcggggcccctgccggagtcgctgttccagctcaagaacctgaccgtgatcaacttctcccacaaccagttcaccgacagcatcgtgcctcttctcggctcgacctccctcgccgtgctggcgctcaccgacaacagcttctccggcgtcatcccagcagtggtcgcccgatcaaggaacatggtccggctccagcttggcggcaaccggctcaccggcgcgatacctgccgaactaggcaatctgacaaggctcagcatgcttgacctttcgctcaacaagctctccagcgacattccggcagagctctccaactgcgttcagctcgcccatctgaagctcgacgggaacagcctgacgggcaccgtccctgcatggctcggcagcctcaggtcgctcggcgagctcgacctctcgtggaacgcgttgactggaggcatcccgccggagctaggcaactgctcaggcctgctgaagctgtccctcagtgacaaccacctcaccggaagcatcccgccggagatcggcaggctgacgtctctgaacgttctgaacctgaacaagaacagcctcaccggcgccataccgccagcgttgcaccaatgcgacaagctgtacgagctgagactgtcggagaactcgctggagggaccaatcccgccggagctcgggcagctctcggagctgcaggtgatacttgacctgagccggaacaggctctccggcaagatcccggcgtctctcggcggactcgtgaagctggagcggctgaacctgtcatccaaccggctggatgggcagataccgtcctcgctgcagcagctgacgagcctgcatcgcctgaacctatccgacaaccacctctcaggcgcggtgcccgcggagctatcgggcttcccggcggcgtcgttcgtcggcaacgagctctgcgccgcgcctctgcagccgtgcgggccgcggtcgcctgctactgctaggcggctgtcgggcacggaggtggtcatgatcgttgcgggcatcgccctggtctcggcggtggtgtgcgtggcgctgctgtacaccatgctgagggtgtggagcaactggcgggcggtgtcggtgtccaactccgatggcgaggagtcggcacatggtggcggcggggggaagtgggtggacggcaagtacaggaaagtggggtcatcggtgtcttggtcgtcggaacagaagcacaactcggggtccgagaccaccagcgtgctccatggcaagtccacggaggccgccggc

SEQ ID NO: 250 - protein, 971 aa, Zea mays
MAIKQSISFTLRVLADLSLLLFCVLLAPVCSATPATAPAVLLQVKSGLTDPGGVLSGWSLEADVCSWHGITCLPGKVSPGIVTGLNLSGHGLSGVIPPAMSGLISIESIDLSSNSLTGSIPPELGALENLRTLLLFSNSLSGTIPPELGLLKNLKVLRIGDNGLHGEIPPHLGNCSELETLGLAYCQLNGTIPAELGNLKRLQKLALDNNALTGGIPEQLAGCVSLRFLSVSDNMLQGNIPSFVGSFSDLQSLNLANNQFSGGIPAEIGNLSSLTYLNLLGNSLTIPAELNRLGQLQVLDLSVNNISGKVSISAAQLKNLKYLVLSGNLLDGAIPEDLCTGDSSSLLENLFLAGNNLEGGIEALLSCTALQSIDVSNNSFTGVIPPGIDRLPGLINLALHNNSFTGALPPQIGSLSNLEVLSLFHNGLTGGIPPEIGRLQKLKLLFLYENQMSGTIPDELTNCTSLEEVDFFGNHFHGPIPERIGNLKNLTVLQLRQNDLSGPIPASLGECRSLQALALADNRLTGSLPETFGQLAELSVITLYNNSLAGPLPESLFQLKNLTVINFSHNQFTDSIVPLLGSTSLAVLALTDNSFSGVIPAVVARSRNMVRLQLGGNRLTGAIPAELGNLTRLSMLDLSLNKLSSDIPAELSNCVQLAHLKLDGNSLTGTVPAWLGSLRSLGELDLSWNALTGGIPPELGNCSGLLKLSLSDNHLTGSIPPEIGRLTSLNVLNLNKNSLTGAIPPALHQCDKLYELRLSENSLEGPIPPELGQLSELQVILDLSRNRLSGKIPASLGGLVKLERLNLSSNRLDGQIPSSLQQLTSLHRLNLSDNHLSGAVPAELSGFPAASFVGNELCAAPLQPCGPRSPATARRLSGTEVVMIVAGIALVSAVVCVALLYTMLRVWSNWRAVSVSNSDGEESAHGGGGGKWVDGKYRKVGSSVSWSSEQKHNSGSETTSVLHGKSTEAAG

SEQ ID NO: 251 - DNA, 1716 bp, Zea mays
atgcagttagtaatgaggtgttctttgcttgctgggacgacctgactggccgattctggcttgcgctttctgcagagccccgacggcgacgtcatcgactgcgtgccggcgcacctgcagccggcgttcgagcaccccaagctgaggagccagaagccagaggtaggtaaggtggcccgcccatgagcgatgacgacgagcacgcagctcgccgctcatcggtcgatcgatcggtctcttctttgtcccagctctgaaatgcgccatgcctccgcgtatacgcaacgcaggaggagcccgaagagaggccgaggagcagcgctggccgcttctccgacgctggccaggacgaggacgacgacccgttgccgcaggtgtggcggcgctccggcgagtcctgcccggaggggaccataccagtgcggcgaaccacggaggacgacgtgctcagggccaccgcctcttccgccacccggttcgggatgaaggcccgcggtgcggggctcgggttcgcgcggcgcgactccaccggtggcggccacgaggtcagtgccaatcggcggtcagtcagtcactgccgcggtgacgacggtcgccggtcaacagtcaacactccaataatttacctttggctgtgcaagcgcagtgcaagaaatttgctcatcaagggcacacgatgaaaagctgaaatgacaccaataattgcgtgattattgttgtgtgcttgcgacttgcgagtccgatccatccggcacaggtgacagtcacggtacagggggctgcactcgcaatggccagcacatgcacatgctgtcgactcgactgcatcgttaaacaatgggagaacgtcagtacgtcactgagcagctagacggcctctgtttgcagcacgcggtggggtacgtgaccggcgggcagttctacggcgccaaggcgagcctgaacgtgtggccggcgcaggtggcgtcgccggcggagttcagcctctcgcagatctgggtcatctccggcgccttcggcaacgacctcaacaccatcgaggccggctggcaggtcagccctcagttgtacggcgacaacagccccaggttcttcacctactggacagtaagagcagctccctcgatcatccctcgtcaccattttttccggccatcaatcaagtaaaaaaatggaaacgcaacgcaggacgacgcgtaccaggagacgggctgctacaacctccactgctcgggcttcgtgcagaccagcagccgcgtggccatcggcgccgccatctcgcccgtctcctcctacgccggccgccagttcgacgtcacgcttctcatctggaaggacccgcgccggggccactggtggctgcagctcggctccggcgcgctcgtcggctactggccctccgcgctcttcacgcacctcggctcgcgcgccgacatggtgcagttcgggggcgaggtcgtcaacgcgcgccccgccggcgcgccgcacacgcccacgcagatgggctccggccgcttccccgccgagggatacgcgcgcgccgcatacttccgcaacgtgcagctcgtcgactgggacaacaacctcgtcccggccgccgggctccgcctgctcgccgaccggccgggatgctatgacatcgccggcggcagcggcggcgcgtggggcacctacttctattacggcgggcccggcaggaacgcacggtgcccgtag

SEQ ID NO: 252 - DNA, 1164 bp, Artificial Sequence
  cDNA of Zm00001d037668 - NC262A genotype
atgcagttagtaatgaggtgttctttgcttgctgggacgacctgactggccgattctggcttgcgctttctgcagagccccgacggcgacgtcatcgactgcgtgccggcgcacctgcagccggcgttcgagcaccccaagctgaggagccagaagccagaggaggagcccgaagagaggccgaggagcagcgctggccgcttctccgacgctggccaggacgaggacgacgacccgttgccgcaggtgtggcggcgctccggcgagtcctgcccggaggggaccataccagtgcggcgaaccacggaggacgacgtgctcagggccaccgcctcttccgccacccggttcgggatgaaggcccgcggtgcggggctcgggttcgcgcggcgcgactccaccggtggcggccacgagcacgcggtggggtacgtgaccggcgggcagttctacggcgccaaggcgagcctgaacgtgtggccggcgcaggtggcgtcgccggcggagttcagcctctcgcagatctgggtcatctccggcgccttcggcaacgacctcaacaccatcgaggccggctggcaggtcagccctcagttgtacggcgacaacagccccaggttcttcacctactggacagacgacgcgtaccaggagacgggctgctacaacctccactgctcgggcttcgtgcagaccagcagccgcgtggccatcggcgccgccatctcgcccgtctcctcctacgccggccgccagttcgacgtcacgcttctcatctggaaggacccgcgccggggccactggtggctgcagctcggctccggcgcgctcgtcggctactggccctccgcgctcttcacgcacctcggctcgcgcgccgacatggtgcagttcgggggcgaggtcgtcaacgcgcgccccgccggcgcgccgcacacgcccacgcagatgggctccggccgcttccccgccgagggatacgcgcgcgccgcatacttccgcaacgtgcagctcgtcgactgggacaacaacctcgtcccggccgccgggctccgcctgctcgccgaccggccgggatgctatgacatcgccggcggcagcggcggcgcgtggggcacctacttctattacggcgggcccggcaggaacgcacggtgcccgtag

SEQ ID NO: 253 - protein, 386 aa, Zea mays
MQLVMRCSLLAGTTLADSGLRFLQSPDGDVIDCVPAHLQPAFEHPKLRSQKPEEEPEERPRSSAGRFSDAGQDEDDDPLPQVWRRSGESCPEGTIPVRRTTEDDVLRATASSATRFGMKARGAGLGFARRDSTGGGHEHAVGYVTGGQFYGAKASLNVWPAQVASPAEFSLSQIWVISGAFGNDLNTIEAGWQVSPQLYGDNSPRFFTYWTDDAYQETGCYNLHCSGFVQTSSRVAIGAAISPVSSYAGRQFDVTLLIWKDPRRGHWWLQLGSGALVGYWPSALFTHLGSRADMVQFGGEVVNARPAGAPHTPTQMGSGRFPAEGYARAAYFRNVQLVDWDNNLVPAAGLRLLADRPGCYDIAGGSGGAWGTYFYYGGPGRNARCP

SEQ ID NO: 254 - DNA, 3451 bp, Zea mays
atgagtcttggcgttatgatgagtaggagaagcaaatggcgggctgtcatggcgtccgcggtgctggtgctgtgcgtgggctgtgccgtcgccgtggacgagcaggcggcggcgctgttggtgtggaaggccacgctgcggggcggcgatgcgctagccgactggaagccgaccgacgcgtctccgtgccggtggacgggcgtgacgtgcaacgccgacgggggcgtcacggagctgagcctgcagttcgttgacctgttcggcggcgtgccggcgaacctgaccgccctgggctccacgctgtcccggctcgtccttaccggcgcgaacctgacggggcccatcccgccggggctcggccagctgccggcgctggcgcacctcgacctcagcaacaatgcgctcacggggccaataccggcggagctgtgccggccggggagcaagctcgagacgctgtacctcaactccaaccgcctggagggcgccctgccggacgccatcggcaacctcacctctctccgggagctcatcatctacgacaaccagcttgcgggcaagataccggcggctatcggccggatggccagccttgaggtgctccgtggcggcgggaacaagaacctccacagcgcgctccctaccgagatcggcaattgctctcggctaaccatgatcggcctcgccgagaccagcatcaccgggccgctgccggcgagcctcggccagctcaagaacctcactacgctagccatttacacggcgctgctctctggcccgataccgccggagctcggccactgcaccagcctggagaacatctacctctacgagaacgcgttgtccgggtccgtcccgtcgcagctcggcaggctcaagagactcacgaacctgctgctgtggcagaaccagctcgtcggcatcatcccgccggagctcgggtcgtgtcccgagctcaccgtcatcgacctgtcgctcaacgggctcaccggccacatcccggcctcgttcggcaaccttccgtcgctgcagcagctgcagcttagcgtgaacaagctctccggcacggtgccgcccgagctcgcccggtgcagcaatctcactgacctcgagctcgacaacaaccagttcaccggcagcatacctgccgtgctcggcggcctcccgtcgctgcgcatgctctatctgtgggccaaccagctgacgggcatgatcccgccggagctcggccggtgcacgagcctcgaggcgctcgacctgtcgaacaacgcactgactggacccatcccgcggcccctctttgcgctgccacggctttccaagctactgctcatcaacaacaacttgtccggggagttgccgccggagattggcaactgcacgtcccttgtccggttccgagtgagtggcaaccacatcaccggcgcgataccgaccgagatcggaaggcttggtaacctcagcttcctggaccttggttcgaaccggttgtccggctctctgccagcagagatatctgggtgccggaatctcacgttcgtcgacctgcacgacaacgctatttccggcgaactgccaccggagctgttccaggacttgctctctctccagtacctcgacctctcctacaacgtcatcggaggcactctcccgtcggacatcggcatgctcacctcgctgacgaagctcatcctcagcggcaatcggctgtctgggccggtaccaccggatattggttcgtgctcccggctccagctcctcgacctcggcggcaactcactttctggcaagattccggggagcataggcaagatctcggggctggagattgctcttaacctcagctgcaacagtttcaccggcacagtcccggcggagttcgctgggcttgtgaggctcggggtgctcgacatgtcgcataaccagctgtccggtgatctccagacgctgtccgcgctccagaacctcgtggccctcaacgtatccttcaacggcttcaccggtcggctgccggagacggcgttcttcgcaaagcttcccacgagcgacgtcgagggcaatccggcgctgtgcctctcccggtgcgcgggcgacgctggcgaccgcgagagcgacgcgcgccacgcggcgcgcgtggcgatggccgtgctgctgtctgccctcgtcgtgctcctcgtgtccgcggcgctcattctcgtcgggcggcactggcgcgccgcgcgcgccggcggcggggacaaggacggcgacatgtcgccgccgtggaacgtgacgctgtaccagaagctggagatcggcgtcgcggacgtggcgcgcagcctgacgcccgcgaacgtgatcggccaggggtggtccggctcggtgtaccgggcgaacctcccgtcgagcggcgtcaccgtcgccgtgaagaagttccggtcgtgcgacgaggcgtccgccgaggcgttcgcgagcgaggtgagcgtgctcccccgggtgcgccaccgcaatgtcgtccggctgctggggtgggcggccaaccgccgcacgcgcctcctgttctacgactacctcccgaacggcaccctcggcgacctgctccacggcggaggcgcggccggcaccgccgtggttgagtgggaggtgcggctcgcgatcgccgtcggtgtcgccgagggcctcgcgtacctccaccacgactgcgtgccggggatcatccaccgcgacgtcaaggccgagaacatcctccttggggagcgttacgaggcgtgcgtcgctgacttcggcctggccaggttcaccgacgagggcgccagctcgtcgcctccgccgttcgccggatcctacggctacatcgctcccggtaagccggccgtccgttgctcgcttcttccattctttagcactgagttggcctgacatttactaattatcaaatccactggtttcgtcctgatcgacgcgtgcagagtacggctgcatgaccaagatcacgacgaagagcgacgtgtacagcttcggcgtagtgctgctggagatgatcacgggtcggcggccgctggaccattcgttcggcgaggggcagagcgtggtgcagtgggtgcgcgaccacctgtgccggaagcgggagcccatggagatcattgacgcgaggctgcaggcccggccggacacgcaggtgcaggagatgctgcaggctctcggcatcgcgctgctctgcgccagcccgcgccccgaggaccggccgatgatgaaggacgtggcggcgctgctgcgtggcatccaacacgacgacagcatcgaggcgcggaaagctggaggcggagcaacagtggccgaggccggggccggagcgagaaaatggaccgacccgaagcagcccatttctccgaccaaattgatggccttagcccaaccaggccaggcccggacaagttcagggtcgcaaagcctgctcaagaacccggagtaa

SEQ ID NO: 255 - DNA, 3345 bp, Artificial Sequence
  cDNA of Zm00001d037672 - NC262A genotype
atgagtcttggcgttatgatgagtaggagaagcaaatggcgggctgtcatggcgtccgcggtgctggtgctgtgcgtgggctgtgccgtcgccgtggacgagcaggcggcggcgctgttggtgtggaaggccacgctgcggggcggcgatgcgctagccgactggaagccgaccgacgcgtctccgtgccggtggacgggcgtgacgtgcaacgccgacgggggcgtcacggagctgagcctgcagttcgttgacctgttcggcggcgtgccggcgaacctgaccgccctgggctccacgctgtcccggctcgtccttaccggcgcgaacctgacggggcccatcccgccggggctcggccagctgccggcgctggcgcacctcgacctcagcaacaatgcgctcacggggccaataccggcggagctgtgccggccggggagcaagctcgagacgctgtacctcaactccaaccgcctggagggcgccctgccggacgccatcggcaacctcacctctctccgggagctcatcatctacgacaaccagcttgcgggcaagataccggcggctatcggccggatggccagccttgaggtgctccgtggcggcgggaacaagaacctccacagcgcgctccctaccgagatcggcaattgctctcggctaaccatgatcggcctcgccgagaccagcatcaccgggccgctgccggcgagcctcggccagctcaagaacctcactacgctagccatttacacggcgctgctctctggcccgataccgccggagctcggccactgcaccagcctggagaacatctacctctacgagaacgcgttgtccgggtccgtcccgtcgcagctcggcaggctcaagagactcacgaacctgctgctgtggcagaaccagctcgtcggcatcatcccgccggagctcgggtcgtgtcccgagctcaccgtcatcgacctgtcgctcaacgggctcaccggccacatcccggcctcgttcggcaaccttccgtcgctgcagcagctgcagcttagcgtgaacaagctctccggcacggtgccgcccgagctcgcccggtgcagcaatctcactgacctcgagctcgacaacaaccagttcaccggcagcatacctgccgtgctcggcggcctcccgtcgctgcgcatgctctatctgtgggccaaccagctgacgggcatgatcccgccggagctcggccggtgcacgagcctcgaggcgctcgacctgtcgaacaacgcactgactggacccatcccgcggcccctctttgcgctgccacggctttccaagctactgctcatcaacaacaacttgtccggggagttgccgccggagattggcaactgcacgtcccttgtccggttccgagtgagtggcaaccacatcaccggcgcgataccgaccgagatcggaaggcttggtaacctcagcttcctggaccttggttcgaaccggttgtccggctctctgccagcagagatatctgggtgccggaatctcacgttcgtcgacctgcacgacaacgctatttccggcgaactgccaccggagctgttccaggacttgctctctctccagtacctcgacctctcctacaacgtcatcggaggcactctcccgtcggacatcggcatgctcacctcgctgacgaagctcatcctcagcggcaatcggctgtctgggccggtaccaccggatattggttcgtgctcccggctccagctcctcgacctcggcggcaactcactttctggcaagattccggggagcataggcaagatctcggggctggagattgctcttaacctcagctgcaacagtttcaccggcacagtcccggcggagttcgctgggcttgtgaggctcggggtgctcgacatgtcgcataaccagctgtccggtgatctccagacgctgtccgcgctccagaacctcgtggccctcaacgtatccttcaacggcttcaccggtcggctgccggagacggcgttcttcgcaaagcttcccacgagcgacgtcgagggcaatccggcgctgtgcctctcccggtgcgcgggcgacgctggcgaccgcgagagcgacgcgcgccacgcggcgcgcgtggcgatggccgtgctgctgtctgccctcgtcgtgctcctcgtgtccgcggcgctcattctcgtcgggcggcactggcgcgccgcgcgcgccggcggcggggacaaggacggcgacatgtcgccgccgtggaacgtgacgctgtaccagaagctggagatcggcgtcgcggacgtggcgcgcagcctgacgcccgcgaacgtgatcggccaggggtggtccggctcggtgtaccgggcgaacctcccgtcgagcggcgtcaccgtcgccgtgaagaagttccggtcgtgcgacgaggcgtccgccgaggcgttcgcgagcgaggtgagcgtgctcccccgggtgcgccaccgcaatgtcgtccggctgctggggtgggcggccaaccgccgcacgcgcctcctgttctacgactacctcccgaacggcaccctcggcgacctgctccacggcggaggcgcggccggcaccgccgtggttgagtgggaggtgcggctcgcgatcgccgtcggtgtcgccgagggcctcgcgtacctccaccacgactgcgtgccggggatcatccaccgcgacgtcaaggccgagaacatcctccttggggagcgttacgaggcgtgcgtcgctgacttcggcctggccaggttcaccgacgagggcgccagctcgtcgcctccgccgttcgccggatcctacggctacatcgctcccgagtacggctgcatgaccaagatcacgacgaagagcgacgtgtacagcttcggcgtagtgctgctggagatgatcacgggtcggcggccgctggaccattcgttcggcgaggggcagagcgtggtgcagtgggtgcgcgaccacctgtgccggaagcgggagcccatggagatcattgacgcgaggctgcaggcccggccggacacgcaggtgcaggagatgctgcaggctctcggcatcgcgctgctctgcgccagcccgcgccccgaggaccggccgatgatgaaggacgtggcggcgctgctgcgtggcatccaacacgacgacagcatcgaggcgcggaaagctggaggcggagcaacagtggccgaggccggggccggagcgagaaaatggaccgacccgaagcagcccatttctccgaccaaattgatggccttagcccaaccaggccaggcccggacaagttcagggtcgcaaagcctgctcaagaacccggagtaa

SEQ ID NO: 256 - protein, 1114 aa, Zea mays
MSLGVMMSRRSKWRAVMASAVLVLCVGCAVAVDEQAAALLVWKATLRGGDALADWKPTDASPCRWTGVTCNADGGVTELSLQFVDLFGGVPANLTALGSTLSRLVLTGANLTGPIPPGLGQLPALAHLDLSNNALTGPIPAELCRPGSKLETLYLNSNRLEGALPDAIGNLTSLRELIIYDNQLAGKIPAAIGRMASLEVLRGGGNKNLHSALPTEIGNCSRLTMIGLAETSITGPLPASLGQLKNLTTLAIYTALLSGPIPPELGHCTSLENIYLYENALSGSVPSQLGRLKRLTNLLLWQNQLVGIIPPELGSCPELTVIDLSLNGLTGHIPASFGNLPSLQQLQLSVNKLSGTVPPELARCSNLTDLELDNNQFTGSIPAVLGGLPSLRMLYLWANQLTGMIPPELGRCTSLEALDLSNNALTGPIPRPLFALPRLSKLLLINNNLSGELPPEIGNCTSLVRFRVSGNHITGAIPTEIGRLGNLSFLDLGSNRLSGSLPAEISGCRNLTFVDLHDNAISGELPPELFQDLLSLQYLDLSYNVIGGTLPSDIGMLTSLTKLILSGNRLSGPVPPDIGSCSRLQLLDLGGNSLSGKIPGSIGKISGLEIALNLSCNSFTGTVPAEFAGLVRLGVLDMSHNQLSGDLQTLSALQNLVALNVSFNGFTGRLPETAFFAKLPTSDVEGNPALCLSRCAGDAGDRESDARHAARVAMAVLLSALVVLLVSAALILVGRHWRAARAGGGDKDGDMSPPWNVTLYQKLEIGVADVARSLTPANVIGQGWSGSVYRANLPSSGVTVAVKKFRSCDEASAEAFASEVSVLPRVRHRNVVRLLGWAANRRTRLLFYDYLPNGTLGDLLHGGGAAGTAVVEWEVRLAIAVGVAEGLAYLHHDCVPGIIHRDVKAENILLGERYEACVADFGLARFTDEGASSSPPPFAGSYGYIAPEYGCMTKITTKSDVYSFGVVLLEMITGRRPLDHSFGEGQSVVQWVRDHLCRKREPMEIIDARLQARPDTQVQEMLQALGIALLCASPRPEDRPMMKDVAALLRGIQHDDSIEARKAGGGATVAEAGAGARKWTDPKQPISPTKLMALAQPGQARTSSGSQSLLKNPE

SEQ ID NO: 257 - DNA, 3052 bp, Zea mays
atggccggggcgggggcgggagcgggggcgctggccgggctcgcagcgtgcgcgacgctggcgtgcaacgtcgcaggcgccgtgctcttcctcctcagccacgacgacgagcggctgcggcgcaggtgtgcggcgaggttgggcgctggcggcgtcgcgtcgcagccggtggaggagtgcggggacgaagaggcgctcgcgccggacgccgtcctcaacctcgagctgtgcgtgtccgcccgttcacgtcccgcgtcgcgggcgcaaggtaactgcatctcgcacagagctgaactgaagcttctgcttggcttgcgctgcatgcagcggcgacccgacgatgtaccaggcgttctggcgggaggttggggactgcggcgccaccgtgatccgcgggtggcaggggatgagctacttctccgacgacgacgccgtgctctgctggttcctcgagccggagctggagcgcgaggtgcgccgactccaccgcatcgttggaaacgccgtcgtcgatggctaccacctcgtggtcggcaccggcgccacccagctctaccaggccgccatgtacgcgctcagttcgccggcgcgccgggaccagcccgtccccgtcgtctcgccggcgccgtactactctgtaagatcacacaacacgcgcggagtgctagtattactgcaatactatgatatgatctcgaatatattacgtgcaaccatatattttgtgcaattataaacaatctccacttttgattctccatctttaaacgttgtagctagttacactttttattctccatttaaaatattgtcaatctatgatttacaacatattgctcgattgatatatttcggctcttacgttgtgccggtgtttcgaacctcgctccgatatgtcttccgggcttcggacattgtgcacggtgggcgtacaatttatatcggttcgggaagaacatctgtacatctagtcatcggcggcttacacaactggcatcattgatgatcaaaactcgtagtatgagttacaagcaaggcaagagagggagtagaggctctcaaatctcttgttcgtggtggaggtggttacaatgtggaattctagctaagttgtggcttggcgacgaggctccgaccttcagatcctcctcctattcgtcgatcttctgggcgtcgtctcgtctgggattcgtccttgcgtcgcccgacagagtcaacctccatccgacagagtcaacctccatgtgccctctccagataggcatcctcctgtgtgctcgggggccgggctcctcccgttaagggggtagaggtcagctcgcggtggcttttttatgaaggatccatcgggtgatggtaaaactgagcctctttaacatgggggtaagtcacacgtgcttgtggtcgccagttgtctcgtattctttattacggacagcgcaggtagtgtgggttggagcaccatcatttaggctatgtagatctctgaccttcgtagcctggagctcgacgtgactcatcgtgttgtgcccgggcagcagcatacgcactcaagcctagtcccaacaggtcataaatatgtgggagacaaaccggcgcctcttttgtgcctcggcgtcaggcgcagttaatgcagctaagagttcttaggtcatgagtgtgagacagaccggctcctctactacggcttggcattagacgtagttaatatggccggtcatttataatgggtcgatctcgagccagacgcgggatgcactcgaatgatttccctttcgacacgttcgtctccctgtccagtttgccacgctcgattctagactccatgtcgcgggattcgtttagaggcgggttcttcaagcgtagatattacctatcttctccagcgggctcagttgtctgatactttttttctccgatgtgctgagatcatatcccgacatgtggtaagaaaaaaatgttaagatactgttacctcatgatttataaccgatatgtactgattgcactgcctctttaaaaaaagtattggttgtacgatatatttcggctatcatcacgtgatgagaaaaaatgttttttttgtcctccatgccagtcctatccgccgcagacagacctcctgctgtcggacttctaccgctgggccggcgatgccaatacgttcaccggcgatgaatgcatcgagctggtctgctcgccgaacaaccccgacggcgccatccgcgaagccgtcgtgaggtccgccggcgccaaggcgatccatgacctggtgtactactggccacagtacacgcccatcaccggacccgccgcccacgacatcatgctcttcagcgtgtccaagctcaccggccacgccggcacgaggctcgggtacgtgcgtaacaacagctgcagcatcagcttgggttgcatttgtaacaacgacggcggtggctttcttctctcctcaggtgggcgctggtgaaggaccgcgaagtggccaggaatatggtctacttcgtcgaccgtagcaccaccggcgtatgcaaggagtcgcagatgcgcgccaccaagatcctcggggtggtctccgacgcctacgaggtcgtcccgccggccagggccagggccagcggcgcggtgccccgcctcttcgacttcgcgctgcggcgcctggaggagcgctggcgcatcctgcgcgccaccgtggctgccaccggcgccttcagcctgccggaggagacctccggctactgcaacttcgctaagcaaaccgtgacagcttgccctggtaacaatgaactggaaattaaccatcgtcatgccaagatgctctgcatgtctgaaactctgaatccttctcgaatctggcttgtctgtagcgttcgcgtggctgcgatgtgagaaggagggcgtcgaggactgcgccgagttgctcgccggccacaagatcgtgggtagcggcggggagcagttcggaggagacgcgcggtgcgtcaggatcaacatgctggacagggacaacgtgttcaacatgctcgtccagcgcctctcctctataaactga

SEQ ID NO: 258 - DNA, 1308 bp, Artificial Sequence
  cDNA of Zm00001d037674 - NC262A genotype
gcgggggcgggagcgggggcgctggccgggctcgcagcgtgcgcgacgctggcgtgcaacgtcgcaggcgccgtgctcttcctcctcagccacgacgacgagcggctgcggcgcaggtgtgcggcgaggttgggcgctggcggcgtcgcgtcgcagccggtggaggagtgcggggacgaagaggcgctcgcgccggacgccgtcctcaacctcgagctcggcgacccgacgatgtaccaggcgttctggcgggaggttggggactgcggcgccaccgtgatccgcgggtggcaggggatgagctacttctccgacgacgacgccgtgctctgctggttcctcgagccggagctggagcgcgaggtgcgccgactccaccgcatcgttggaaacgccgtcgtcgatggctaccacctcgtggtcggcaccggcgccacccagctctaccaggccgccatgtacgcgctcagttcgccggcgcgccgggaccagcccgtccccgtcgtctcgccggcgccgtactactcttcctatccgccgcagacagacctcctgctgtcggacttctaccgctgggccggcgatgccaatacgttcaccggcgatgaatgcatcgagctggtctgctcgccgaacaaccccgacggcgccatccgcgaagccgtcgtgaggtccgccggcgccaaggcgatccatgacctggtgtactactggccacagtacacgcccatcaccggacccgccgcccacgacatcatgctcttcagcgtgtccaagctcaccggccacgccggcacgaggctcgggtgggcgctggtgaaggaccgcgaagtggccaggaatatggtctacttcgtcgaccgtagcaccaccggcgtatgcaaggagtcgcagatgcgcgccaccaagatcctcggggtggtctccgacgcctacgaggtcgtcccgccggccagggccagggccagcggcgcggtgccccgcctcttcgacttcgcgctgcggcgcctggaggagcgctggcgcatcctgcgcgccaccgtggctgccaccggcgccttcagcctgccggaggagacctccggctactgcaacttcgctaagcaaaccgtgacagcttgccctgcgttcgcgtggctgcgatgtgagaaggagggcgtcgaggactgcgccgagttgctcgccggccacaagatcgtgggtagcggcggggagcagttcggaggagacgcgcggtgcgtcaggatcaacatgctggacagggacaacgtgttcaacatgctcgtccagcgcctctcctctataaac

SEQ ID NO: 259 - protein, 436 aa, Zea mays
AGAGAGALAGLAACATLACNVAGAVLFLLSHDDERLRRRCAARLGAGGVASQPVEECGDEEALAPDAVLNLELGDPTMYQAFWREVGDCGATVIRGWQGMSYFSDDDAVLCWFLEPELEREVRRLHRIVGNAVVDGYHLVVGTGATQLYQAAMYALSSPARRDQPVPVVSPAPYYSSYPPQTDLLLSDFYRWAGDANTFTGDECIELVCSPNNPDGAIREAVVRSAGAKAIHDLVYYWPQYTPITGPAAHDIMLFSVSKLTGHAGTRLGWALVKDREVARNMVYFVDRSTTGVCKESQMRATKILGVVSDAYEVVPPARARASGAVPRLFDFALRRLEERWRILRATVAATGAFSLPEETSGYCNFAKQTVTACPAFAWLRCEKEGVEDCAELLAGHKIVGSGGEQFGGDARCVRINMLDRDNVFNMLVQRLSSIN

SEQ ID NO: 260 - DNA, 2369 bp, Zea mays
  misc_feature (1572)..(1628): n is a, c, g, or t
  misc_feature (2107)..(2182): n is a, c, g, or t
atgtcctcgtctccgtccccggcgaaccgccgtccccagggcccgcttgcgctggggctggagtcctcggcgaacaagatcggtatcggcgtggtctccctctcgggtgacatcctctccaacccgcgccacacctacgtgaccccgccgggccatggcttccttccccgggagaccgcgcagcaccacctcgcgcacctcctccctctcctccgcgccgcgctcgctgagtccggtgtggcccccgctgacctcgcatgcgtctgctacactaaaggccccggcatgggcggccctctccaggtcgccgcagcagccgcccgcgcgctctccctgttatggaggaaacctctcgtggcggtcaaccactgcgttgcgcacatcgagatgggccgcgcggtcactggggccgtggaccccgttgtactctacgtctccggcggaaacacgcaggttatcgcctacagcgaggggcggtacaggatcttcggggaaacgattgatattgccgtcgggaactgccttgaccgattcgccagggtcctagagctctccaatgaccctagccccggctataacatcgagcaggtaaactgttccatcaaatgccaattttgttatccaattgctgttgcttaatgttgtttaattctagcgatatgcacatagatgctggtttgtgtgagtgtttttctagcatgaagtattgtcaccatgacgactgcatcacatacatgtaaatgccctgggtggcaaattgttagggaaatggtaaaagttattagtgcaccatgagtattttatcatgaaagggtgtttatgagtcctggagctatcagtggaactttggcacctcttgaactttttactgaccctagccacttgaatttaattgaaaaattaacctacattacgaaattcataggcaatttaatttatgctggctgtacatttagtggctagtttgttgcctccatcaaataatcgagtgttgtacttgtgggcaagattacttttatactccctccgttccaaaatagtagtcgttttagctcttgatttttatgtctatactcaaatggatgaagatgaatctaggcacaaatataaaacgcaaacatcgactcatcaagtattgtgtgaatccaataaatctctaaaacgaattttattttgggacagagggagcatgttttgttgaaacatagcgatcatttgattatatttatgtattgaactatataatatgctgggcagatcttatgtaggactagttttgtgtgacattgcttgcataatgaaggtcaccatagatttattcagtctatgcaatcacttatgtttccttgttttcttttaaactaacacatttaggtagccaaacactatcttactcttatttttccaactcatacaatcagccaacagaacttatctttttacatacagctgaagaacatttattgtatcacggccaggtcaaatgtatccaatgggttgtttggtcgtttaagcactttgaccagtatggggtcataattagcttcattctatatatgttcctttttctcnnnnnnnnnnnnnnnnnnnnnnnnnnnnnnnnnnnnnnnnnnnnnnnnnnnnnnnnntttaagattgaacttcgacactattattaacattgttgacactatggattagtctgtgtgaatcattcaagagagtacttctgaagtagttccacatggtattgttatctaccattctaccttcatcattgtattagctgtcaccattagcatttttctttcttttttgttttgtttttgaagacattttcactttgaagcttgaacagatttatgtttttgtacaatatggcacattcttttctcatccttgagtttggtttcttaatttaccgtatttattttccttgtccagcttgcaaagaagggagaaaaattcattgatgtcccttatgttgtgaagggtatggatgtgtcattcagtggcatattgagctttattgaagctgcggcgattgaaaagcttaaaaataatgagtgcacacctgcggacctatgctactcattgcaggtacttgcatgctcttaaacttttcccnnnnnnnnnnnnnnnnnnnnnnnnnnnnnnnnnnnnnnnnnnnnnnnnnnnnnnnnnnnnnnnnnnnnnnnnnnnngtatgcacatggcatgaccactccccttgaggagtcgacatttacacaaagattccgaactgatgaagttcatgcaatttggagagagaaggagatgccggtgctaaataatacccattcagatgcaattgctgaagtttctaaagatgaagcctccatggcaacaccaatcgttatagattactga

SEQ ID NO: 261 - DNA, 933 bp, Artificial Sequence
  cDNA of Zm00001d037675 - NC262A genotype
  misc_feature (745)..(746): n is a, c, g, or t
atgtcctcgtctccgtccccggcgaaccgccgtccccagggcccgcttgcgctggggctggagtcctcggcgaacaagatcggtatcggcgtggtctccctctcgggtgacatcctctccaacccgcgccacacctacgtgaccccgccgggccatggcttccttccccgggagaccgcgcagcaccacctcgcgcacctcctccctctcctccgcgccgcgctcgctgagtccggtgtggcccccgctgacctcgcatgcgtctgctacactaaaggccccggcatgggcggccctctccaggtcgccgcagcagccgcccgcgcgctctccctgttatggaggaaacctctcgtggcggtcaaccactgcgttgcgcacatcgagatgggccgcgcggtcactggggccgtggaccccgttgtactctacgtctccggcggaaacacgcaggttatcgcctacagcgaggggcggtacaggatcttcggggaaacgattgatattgccgtcgggaactgccttgaccgattcgccagggtcctagagctctccaatgaccctagccccggctataacatcgagcagcttgcaaagaagggagaaaaattcattgatgtcccttatgttgtgaagggtatggatgtgtcattcagtggcatattgagctttattgaagctgcggcgattgaaaagcttaaaaataatgagtgcacacctgcggacctatgctactcattgcagnngtatgcacatggcatgaccactccccttgaggagtcgacatttacacaaagattccgaactgatgaagttcatgcaatttggagagagaaggagatgccggtgctaaataatacccattcagatgcaattgctgaagtttctaaagatgaagcctccatggcaacaccaatcgttatagattactga

SEQ ID NO: 262 - protein, 310 aa, Zea mays
  misc_feature (249)..(249): Xaa can be any naturally occurring amino acid
MSSSPSPANRRPQGPLALGLESSANKIGIGVVSLSGDILSNPRHTYVTPPGHGFLPRETAQHHLAHLLPLLRAALAESGVAPADLACVCYTKGPGMGGPLQVAAAAARALSLLWRKPLVAVNHCVAHIEMGRAVTGAVDPVVLYVSGGNTQVIAYSEGRYRIFGETIDIAVGNCLDRFARVLELSNDPSPGYNIEQLAKKGEKFIDVPYVVKGMDVSFSGILSFIEAAAIEKLKNNECTPADLCYSLQXYAHGMTTPLEESTFTQRFRTDEVHAIWREKEMPVLNNTHSDAIAEVSKDEASMATPIVIDY

SEQ ID NO: 263 - DNA, 1311 bp, Zea mays
atgaccaggcggtggccacctttctctgcccgtgtctccgccgccgtgttcctgctgctgctatcccccgccgcgacctcccagctcggcctgggccccgccattgccgcctggattaacggctcgccgccgcctagccctgacgccgccgccgccgccgcctcgggcccacggagccaggagtacgcggcgctgcaggcgctgaaggttgccgtcaccgacgaccccaagggagcgctcgcgtcgtggcagggcgccaatgtgtgcgcctacaagggcgtgtactgctccgcgccgcccgacggcgccgcggccgccggcgcgtcgacggtagtcgcgggcatcgacctcaaccgcgccaacctcaggggcacgctccccgacgcggtgtccctcctggcgcacctcaccttcctccacctcaacagcaaccggctcgggggcgccgtccccgacacgctccgggacctgcagtacctgacggagctggacctgagcaacaacctcttctcgggcccgttcccggcgtccacgctgctcatcccgtcgctggtgtacctggacctccgcttcaacgccttctccggggaggtcccgcccgaggtgttcgccaaggagctggacgccgtgttcctcaacgacaaccagttcgagggccagatcccggacacgctgtgggcgtcgcccgccacggtcatcacgctggccaacaaccacttcaccggcgccgtcccggcggcctacgagttcggcgccggcgccggggccggtggccgggtccgcgaggtgctgttcctgaacaacaacctgaccggctgcgtgcccgaggcgctgggcttcctccccagcatgcaggtgctggacctcagctacaacgcgctgtcgggacacctcccggggacgctctcgtgcctgtcggggatcgaggtgctcaacctcgcgcacaaccagctcacgggcgagctcccggacctgctgtgcgacctgcgccggatcaccaacctgtccgtgtccttcaacttcttctccgggatcagccagcgctgcgaccggcagctggggagccgcggcgtgttcgacttcgtgggcaactgcgtgcccgggcgggacatgcagcggccgcagcccgagtgcgacgagttcccgggggaaggcggtctcagctgcctccgcatccccggggcgcggccagccgggtgtggcgacgcgggcgtcactattggcgtgggcgtcggagtgggcatcgggggcctgccgttcgggttgccaggcgctgccgctggaggcgtggtcaccgtcaccgtgccgtga

SEQ ID NO: 264 - DNA, 1311 bp, Artificial Sequence; identical to SEQ ID NO: 263
  cDNA of LRX4 - NC262A genotype

SEQ ID NO: 265 - protein, 436 aa, Zea mays
MTRRWPPFSARVSAAVFLLLLSPAATSQLGLGPAIAAWINGSPPPSPDAAAAAASGPRSQEYAALQALKVAVTDDPKGALASWQGANVCAYKGVYCSAPPDGAAAAGASTVVAGIDLNRANLRGTLPDAVSLLAHLTFLHLNSNRLGGAVPDTLRDLQYLTELDLSNNLFSGPFPASTLLIPSLVYLDLRFNAFSGEVPPEVFAKELDAVFLNDNQFEGQIPDTLWASPATVITLANNHFTGAVPAAYEFGAGAGAGGRVREVLFLNNNLTGCVPEALGFLPSMQVLDLSYNALSGHLPGTLSCLSGIEVLNLAHNQLTGELPDLLCDLRRITNLSVSFNFFSGISQRCDRQLGSRGVFDFVGNCVPGRDMQRPQPECDEFPGEGGLSCLRIPGARPAGCGDAGVTIGVGVGVGIGGLPFGLPGAAAGGVVTVTVP

SEQ ID NO: 266 - DNA, 15411 bp, Zea mays
cctcgcatggctccattgcatgggggcttcagcgcgggaaagtcgggtctccgttgggatttacttgttcgtcgttgtgggccgtccgggtttgctccaatccagccttacgtcttctctgctttgttgatcgtttttccccaggcccacgaaagaacgatcttacgatttattgggcctttgggcctttcgggagatcttttatttctttagtggacccgggggatatctatcccccacagattgcaacaatactaacaaaatatggttgatactttatattttggcatattatgcacaaagcaagtgtcttatatgaccatcgtgatttatgcattttcaaactaaaatttacgacacttctttttgcgttttacgcttcggctaaaaagcaatcttctatgttttacgtcaatttatggcatttttatgtgttcaaaggtagtttcttattttttaatctgaaccgtgtgttgccttctttcgagttgttacgcaacaaatggtccagttttacgatgtgttttatgctcaaaatccttctgcgcgacatgcatagaaactactgctgcatcgtgtgcgattttcacgtccacggttacgaaataggtctccaatttacactaaaacttgtaatcgcttacgctgttttagtttacgttttacgatctgatttgcccaaactagaaacaagcgtatcgggcgcacgccagctcagcctggaaaacgcgcgcgcgggctctgcatggccgattttcacatcgtcacgctctattacgaaactgattcccaatttacgctaaaacttgtaatcatttacgctattttagtttatgttttacgctatgatctgctcgaaccagaaataggcacatcgggcgcacgccggcccagcccggaaaacacgcgtgcgggctctgcatggccgattttcacgtcgccacgctctgttacgaaacagattcccaatttacgctaaaacttgtagtcgtttatgctgttttagtttatattttatgctttgatctgctcgaactagaaacaggcgcatcgggcgcatgtcgacctagcccgcaaaacgtgtgtggggtctgcctggccgggacttcccggtattaatggaagccctgggcttccagtaccttctcctatatatatatattactatcttcgttttaatttataattcgtttgatttttttgttaaatttgacccgctcgtattattcaaaaaaattgcaaaaaatgaaaaatcaaagtcatactttagcttaaagtatattatgtgctaatgatatcaccgtaaaaattaacgataattgaagttttttaataggtcgaaccggtcaaacttgaggtaaaaaataaaaaaaaaaattataaattgtaacagagggagtatagaacagtactaaaaagaagtaccagatgcattaaggagcccgtgaagggacaaaggtgttacgttgattcgagaaaaaggcattaaattttctagcaattcgtttgtcctcttttgccggaagatatttccagtaattctgatcgttcaagttgcagttttcttgaaatacccagaatcaattcagttacagtctacagcaatgaacaagacttaaataaatcagctcagttttgtttatatgatgcttcatgatagttgttttataaagacttaagtaaatcgactcagtttagcatggtacaataaagcagaggcaatgaaagtgatcacagtagtttccaccaaacaaaataggaagtgctcaaattatgactgtacaggcaatgccagactagaagacccttagacaacgaatctagacacatatataaaatacatacatcaaatattgtatgaatctattaacaccctaaaacgaatactattttagaaaggaggaagtagctgacaggtgccatatgtaaaagttcacaagattatcaataacagatgtctggcaaaaacaaaatactatctaagtttccaacagctaacaactatggctgactactcccgaaacggcgagccaaaatctcttgtttcatcaacttgaagtattgtttcgattcttcatccattgtgcttgtgtctgtttgcattatctctttgtcatgtcgatctcgctccaattcaagcttactcttttccaactcatagaacttgtcatcatgggtctttcggtctcgttctgtttcttcccgtgcttccctcatattttttacttcttcaatgaacggatcaccatcaacatcagatccaccatgctttctcacacgagccttttccttctcagctttcctcccctgtggtctataaatgttggcaggagcatcagtattagcattgtttgcttcatgctggtctttgatctttgattctctaaatgcccactttggctcatgccttagaatcatccacacatggaatacagaaaaagccttcccttgtttttctcggaattctacttctgcttcagcatgctacaaaacaacacaggattcacaaatgtgagaagttgcatgttatgttaagaagtataaataatggtacaaaatgtatgattcaccttgtcatcacttgtctggccactgtgatttttcctttctatggcatcatagtaaccttgaaagatattcacttccttctgaattgcaagccagcgatgtttcaatgacaaccaactatgatcggactcgaatgtcctattcttgttatagtatttccatactctttcccaaaatgtgccttcttttttatcccttccagtaatagaatctttgcttacattaaggtagctagaaaccaacattaagtcctcatcttcactgaaattatagtattgatccctcttaatcgtctgcaagttcatttcattcactagtggtaactctatcactttattatgaacttccacaatattatcggagccaacaacatctgcactttcctggttcggtaaagaagtgaggtacccatcctgggactccatagaactgcaaaataggaatacatagtagcatatcagtatccgagcattccatctagttgaagcatattgcaagtactattcaaacaagcatccatgagaaatgtagctagcgatgaagggctagttgaaacaactcaatgccaataatcatacatccatcttaacaatgaccccataaacaatatcaatgatttcatgtcgggaatatgaaatgtttcacaaatacatcatcacacataggtacaacaagagacatttcaattagtgacagtaggtagaatagtacaccaatagccatatattagtaataactctgaaattcagaatattaacctttcaactactcatctgattctacagacctatgtgctatttccagttgccagtcccccgttgcataaattttgcattacatcatcagtgatgagacctagcatgactgcatgactgagcgtccgaacgcgagtttgggtctgttcggctatgcctgggcgcctagctacgtgggatctaaaatgcctttctgcagcatatcgttaaattcgaaagaatactacctaaaatcggacatcccagagggatcgttgttgcctaagattgagttcgttcgaagttggggttgtgggcatgaagcagctctagcagacattgaacctccagaatcttgcgaatcacatccatgacgacatttaacgaaggcctactataactctttacctgttgctgctgagattctatcgatccatctcaaagccatgttttactcttatgtcctatatttgaagatagtacctagtttaagacctctcttggagatgctctcaagggccgaactttataagaaaatacaagagaaataattttatttgacatcgttgtattgtaggagtggaaaattagtacctcttcattttctggtgcttctgattattctgctcttgtactgcatcacagaggtccgcttcgtcctgtatcatactattttcctgaagtcttcgtatttccagatttgggatacttgtgccagatatagctttccgaactgcagcttctgcgtttttcaccatgttatggctggcatcgaaacaaattatttcaacacgaacatgctctagggaagacaggttctccaaaccaaagcagaaatctttgttcacatcttgtgtacgtgaagcatggaacacaatcatgagccttttgagctgttccgtgccatttgattgttgacgtggaaacatctctaccattgcattgctcacaaactttaagctctctagcttactgaacctgtcagagccgatcacaaagtatccttttggttcttgtttcgatgtcagggatagagaaccaagaccaggcagccttccgagcgtatcaattatgtcctgtgacaacttgtagacctcgattgttaacgtgaagatactagaaagtgagccaaaccaacttggcaatatgtcaaatgcgctgcaaccgacctcgagcttctggagacattgaggggtccaattctcacccaaatcatccatgaaaaccagggagcagcatgtcattatggagagactctggatgttctccgtgcactgaaccagtgaacgcaagttgtcacacagttgtttaaaatagttcttcaaactatcatcccatgaccatatggaaattctaagaaccctcaatttggttagcttacagagacttttcagcaactctgggtcggtgacattgatatcgcctagctcctgtaaagcagacatctttgcaataccatatgatatcttcatctgactattaacaattaggcgttccaattttcttatcatgaaaacatattctggcaattcatttagaccacttgcacttaaatctagtgtccgcaaatgttccagcttcgcaatttccttagggatgccagagatacacttacctcctatgaccagatatctcaaagaacttacattatttatacccttgagatgactagcctgcaaagattcacaggcccctaaatccataacatgtagacccttaaactttaagatggatggcgcagtaccacaggagacaagtgacttcacttggggcagccaaggaatttgcaggtctagttctttgttattatgtccctggatgtatagtcgctggtgaacgtgaactgcttctgacaaatctctgccttccgagtcatttaaaatataaacaaatcgttcttcaattgattttgagacgataaagtcatgcaccaagtcatacatgcggcacgtgaggacctttcctccagcatcaacctccactgcatcgattaatttcttttttactagatcactaaggtaggtctctgctacctcttgcccatgtacaaaaccttcagctatccatgcacatattaagtgttctccactaatctcatgtcctcttcgaaacatagtaaaatagagtaagcaattctttagactgtcagttaaaccaggataagaccgatccaacattcttctggcgtacactgcctcccagttctccactgttggtggtatacttgcaagcaatgtcacagtttcgtcgatcacagatagtattccaccacattcttctacaagattgtcacatatatttactagttcagaaggacacttgcctgccgatccaaataaccttttgcagagtagatttttagagatagttgctgatagaggttgtaattgcttgctgccaccaataatttcagtaataccagtgttgcgacttgtcgtaagaactacactgtggttgttattttcaatcaaagcgcactttataatttcccatgcttttacatcacatatatcatcaaatacaataaagaacctggaaaaataatagtatccaagggttataatccatatttagtagtaactactactgacaacaactgtagcaaaaatggtctcttatgtcatatttcggtgcttcgttttggtgattgattgacacacaacacttagattaacaatgttttctagatgtatattctcaggtttataggtctatgggatgaaatgctgaagacaccaagaagaaccaagtcaaacaaagcaaaatcagataaatcaatactcaccggtttaaccggcagtgtcgaaataacactcatggatataacacacagattttttttagtacacgagtgattagaattttgaagaaaaaataatcaaccacgtcaaataaaaaaaaagaacggagacaatatattgagcaaatatatagctgaataaaggtagtactagcatgttagtgggttggacataccttttgtttatgagcgatttacggactagccagatcaggtccactagatccaatattgccactgggaaatctatgtacctttgcttgtcaagaccacggagaatgtcagcaaaaactctcctcaagtcaggattctggcctagtagaacgaacgccccacggtcaaattgcgaatggagctcttcgaatgctttttgggccagagtagtcttccccagtccctcagaccttacaatagatagtatctttatgttcttagtgtaggcttcgtcatcaaccacagatagcatgtttatgagctgatccattggctcatcaattgatgactttgtgtaaaaagacggcacccgtgttgctttcttcgtcgccacatcgatgcttcttttctcccgctcttgagcttgacgactactctcggccggtgatatctccacaattttcgctccatcgtcgtcttgctgaaacagtgaaataaggcaaatgaaaacaagacaacgaaatgaggtgagagagagatgacaaagagtcctgacctttggtaactctggaggtattgtttgcccaaataagtttatttcaagggtaggacggttgggatgggtacgtattgcatcccgcagagccacctgtgctctccccacagactccacctcctcaccaagggctgtgatttgaacgatggcttgctgaagccaatgtaggtttcccaagccaaagtcaaaatcaaaatcttggtttgaatccgttaggagttgcacactgaaatggaaatcgaggacttcaagcctgggcatagctccatgtacaaatttcagcggtttagttatactgcagcatttcaaattcttgaatccaccacagccacaagtcatgacatcttcacgttcagtattcacaatcaacaagtggagggagtgaagcactggaaaccccccaaggatttccagatcccgttcttccgcctcagataccatcagccataagtggtagaggttaggaagatgtccaggattaatccaaagaggcagccttgagaactccaaccagcgcaattccatggaacgaatatgtctagagagggcatagccttcaggttccaactgaacacctctatttaactgtactccatagtaatcaaaatgtatagcctcgatctctggcagattcgatagggactctagcaaatctctcagctgccattcatcttgtgcttttatcaaaaaacggagcacccttagttgtctcagctttcccagctcattaacaaacctgctcgcagaatcctcatcgtcatgcccaccaggataaatcaccaagtgctgcagggacgtgaggttaccaatccaattgggcactctcgttctccagtcagcaattagacacatcaattctgtaagattatgcaaggcttgaggtaattcttccacaccagttccatcgaggtccaatgtttgcagaaacttgaggttccctattccttccggcagcttaccgataaacgtgtttcttagcccaaggaacttgaggtgatgcaatttcccaagatgaacaagatcatggccttcaatacctgcacaattttcgaaatccagtacacgcaataatttatagctttcaattggaggtatcgcgtatataggacatccaatggcattaagtgacctcaattgtgccagccgtggatgttccacaagtctgtactgctcttttgttatgttctggaatgctaaccgccgagaacgaacatctagaagaccaaacttttcattgactgcagaaacaaattcttcttcgtgtgacatgtagaggatcaaatcatgaaacatattatgaacacgacaagcatatacaagacccgtgccttcaagtgttactggctgcaccatgcttcttcttatgagctcgtggaaacaagattcgccaaggttaaagagcccatcatgtgctagttctccattgaaaaaaccttcagctatccacctccatattaaccgatgcatcccaatctcacaatcttcagggaaaatactcagatataacaaacatgtctttaatcgtgctggtagatcataatagctaagcagcagtatgttcctcaaattctccatttcagtactgttttttagtattctggaaccaatagaatcagcaacattgtaccattcttttatgtttcttgacttactagccagcaagctagatgtagtaataatagccaatggcacgcctccgcatttattcaatattttctcagacgcatcagaaagttcaggaggacatttaccttcagagccaaatattcgtccatagaataatatatttgatttctctcgagtaagaggtttcatcatatagcaaccacctacatactcagcaacatcaattctgcgagtagttgcgattattctgcttcctagcttattctcaggaaaagcccattgtatcattgcccatgcgtcagtatcccatatgtcatcgacagcaataaggtacctatatttattgtattaattggagaagtaatgtaagcatagctaaagatatgaattgcaataatatatataagcatattactctataatatggatatttccgtggaatgaacatataatgcacactaggtgtggtacatgtacgcgtgtacctcttattatgaaggaattcatgcactagattcataagttccaatggggtgctgatgtcaataagttccttgtactcagtctcgtcaagctcataaagcaattccttgaagaatttttcgagctgaggaaaccgagacaccgacacaaaggccgcgcaatggaattcccctttagctttaagtttgtcataaactgcttttgcaagcgctgtcttgccaagtcctccaaaaccaacgatagagactcgcctttgttcagtggaggtgtcatcttccttggtcaaccttgtgattagttcctcccttgcctcatccatgccgacaaggtccgtggccttggtgtacttcagagcaaatatgcgaggatcaaccaaggttttgacacggggaaccatagcatcaacatcgtacctgttagaaccagaaaaggaaataaaatggaagaaagacagtaaaggtgaaagttcatatgcacgcaagccaaagtggaaattaagtgtttcaatgacctttgacgacgctcatctatctgctggacgcgctcttcgaagtccttgatggtctgggcgatctcatggcgattcacgaccatatatgtcttattcatgaatattttggcgcttcttttgctggtgcgttcagggccttggacacgcaccaggaaggtgtcgacgaagtcctccatgtcgtaggatagctccctgacgctgcgtgccaacattctgaccagatcaggacgtggcttcagtggcacaggcacttcgacaacatggccgaggacagaatgaacccgctcgagcttgttcatgacgcgctggatgtcccccctgacgcccttctccaggttgtactcaccatgaagcagcatggagagcttgagaagaagggtgcctagcgctccagttgcgaactccatggctagctagctcccaaggttgcagacgcatgagatctagcgcaacagactaaggcacgtttggtttagcttttttctattcagtttttttgaaaatctgattatgaggagaatctgtctgtagtgagaagctgagtatcaatacgattacgtgtgaacgaagataaagttgttcatatgactcaggatctagaaagtgacggattcctattattacaacgactcaaccggttatgtgtttatgttgattttggatgatttttgcctcaacgaattttatagaaactggctgaaaagctaagcgtttgacagtttgcagcagcttttaatgaccagaagctgccagaagccaaaacaaacacggcctaaaagggatacaatgttttgttggaattcgaatcagctgcttacctagctgtgctcgcttatttgacacgaacttggtggccggaggatatagagattagatcaaacagagttggacggtggcaagatttcagaagtagatttcatcttcatccacagaagaatcaactaaggaatctctctctctctcgctcgcttgggcatggagagcttgggaagaagggtgcctagcgctccagttgcgaactccatggctagctagctcccaaggttgcagacgcataagatctagcacaagagactaaaagggatgagatgttttgttggaattcgaatcagctacttacctagctgtgctcgcttatttgacacgaacttggtggccggaggatatagaaattagatcaaacagagttggacggttggcaagatttcagaagtagatttcatcttcatccacagaagaatcaacttaggaatctctctctctcgcttgggcatatcgaggaaagtgcggctactggcaagtggcaaccaagtactaatctattgatagcatggccagctgtatctgcagccctcagcgtttccctaaatttttcgcgttatatattactacgtagcacagcaaaattcactccactatattcaatctttctgtaactattccgtctatatattcctttatatatcctctacgcataaaatatatatatatcaatccaactatcattaactaccatattttttcaatttttattttcttaacgtataaatccattgaataattgaattaatttttcaattagacatataatctctataagttattgtgggacacataatacgtataattacctattatttaatttctaaattttaaaaaactcataattaaatatattgtgtcgtacatatttctggtgaatatttattaaattcgtattcatcatataccattaccaacaacgaagtaattatttttcgttttgtaattaccatcgatgttattggaccatacccatgctcatagttgatctgcattatcgttcgaagcttttccttcgcaagcacatacgcaacaaccgtacactgcaagcctcccttccaatgcattatgaatctgttggcacccaatatttcagcacgattgaaatatgacatgaatattcgaccaaattccattgcaagcacccatgcgacaaccatacacagcaagacacatgaggctttcagtgcaagacacgagcttgcaacacaagctaactccatctcgtctatacatatgggtacgtgctcttcccatttgtgtgcacatctcactcctcaactcaagctaacaagactttgtacgttgtgtcgtctttgcgtagggacgatgattccgattcgagtgatagtgacgacaacacacttatgcttgccactcttcttaccctcaccattaaggctacacaccgtaggtgtagacgttccggtatcccccgccgcgtgattcacagggatcattatgctggagagaatctcatccaccatcactacttcggctaaatctcgtgtatccaccccacgtgtttcgcagaaggtaacaactacatacttgtattattaagttttgcattaacagtgtctttcatactttacctattacattttataggttccgcatgagtagttcattgttcctccgcattatggaaggactgcaacagcaggatagttactttactcaacgggtcgacgctactggcctagctggactcgaaccacttcaaaaagtatgtgcagcaatgcggatccttgcttacatcttacctactgatgtcgtagacgagtacattcaaataggggagtctaccgttagggaatgccttattcatttctatcgtgcattaattgcatattttagtgggtggtatctacgaactcctaatgaagcagacattgcacgcatcatgcacaatagcgagtcgagggggtttccaggaatgttgggttccatagattgcatgcattgggagtggaggaactgtccaaccgcgtggcgaggatagttctgtggtcgaaatttaagacctaccatgatactcgaggctgtcgcaacgtacgatctctagatttggcatacttttttttggcatgcctagaacaaacaatgacgtgaacgtgctacattgatcgccggtatttgaccctatgacaagcggtcgaatgccacccattcattacataatcaacgatcatgcatacaactttggttattacctagctaatggcatatatctgaactggccaacttttgtgaaagccattagacacccttatgaggaaaaaaagatatatttcagacaaatgtaggaaagttacaggaaggatattgagtgcccatttggagttcttcaagcacgctgggtggtgctacgtgatcctgcgtacggttgggattgcaactgtcttactgagataataactgcatgcataataatgcataacatgattgtcgaagacgaaggcgactttgcagcaaataccaatttcggagagagtagttctgcatttgaaccgtgccaactcattgaaggacgctcggattgggtgattaatcacttcaatcttcgtcgctaggaaaggtcttgcacactacaaaatggtcttgtcgagcatttgtgagcaagacgtggaagtatgtgagtgtcggagaggaaatctctagccgggtggcggaacgcacccgccctaaatcctaagatgaggagggggcctaagcgttttgcctgtctgctagatggtcgatgaaagcacgagagcacacaagagtttagagtggttcaggccaccggagcgtaaaacccttctccactatgtagtattgctgatactcgagagcttggagaacttctcgagggtctaagtaagtctgagtgacttgagagcttgccttgtaacgttgtgtgccttcccttttatagctcaagggaggcacatacaagggtgctgagccccaacatgtgggcccaggaacataatgaatggaatacctagagcaactaatgcaggtgacgtctgtgcaatctccaggcccatgttgtccgcagtacgcgcagtgttgacatgcagtggcagcttccttggtaacatacgagtaatgatgggcgtagtgcacgcggcggtatgggcatgcagtctgccaatggaacggacatgcatgccgcctgtgggatggacaggtcgctgcctgccagcggaatggacaggtctcattaaatgcggaggtagcacatcgcctgctagtggaatggacaggcacgccgcctgcggaatggacaggtctcattaaatgctgaggcggcacatcgcctgtcagcgggatggtcaggcggcacgccttatccgcaataaatgcaggggtcacgtaacccggaggccttacgtcaggctctgccagttggcttacgtcacgcgcagtaggccacgtggcagcatcgggtccccgcctgggcgcggagcagaagtgtatgcggacaggtccgcaccagactgggtctggacatgtgtcgacaccggacccccgcctgagtcctattcaaggcccgggtatgttctatcctgggaccttgggacccccctatgggcggcccggaccccatacggggggggggtccggatcccattccagggatccggcttgcacacgtggaggtccgagaccaaccatgggggtccggactgtatatccgggggtccggcgctctcccgtgggggtccggaccactgttgacgccatggagtatatcaccttctctggacacgtggcggcttcggacccacccatgtggtggagtctggcgctgctgtggacctagaatagtcgcctgagattggggcgagccgtggtttggttccacacacatcacttctaccacgcgactaagggacagccgcgtgggttcttcgtctttgtacagtagcagggggtaccctagtttcatggtaccgacagtgtccctcgggcccaccttaggggaggatgcgagcctgcaggtggggccaaaacttgtacttcacgtcaacatggcatgaccggtgactggggctccacctcagcgcgcgtcgcattaactcagcgcatctggtgacgcacgcgctgtcagtccgtgctcggtcacgtcaactgccacatctatccccgcggctgactgacctatgaccccacgtctggtggttccatcgggccacgcgtggggcgccttgttgccgccgccttggttaataaatagccgtcttccactgcctcgagtccaatctctctctattagctggccagaggtgtccaacaccttcagtaccgttctttggacgagagaagccttatccttcatactttctggacgtgttggtttccaatctgacattttatcagaaggttctgccaatttatccctactgtagttttgtgtcgcttgctcttgtttgctgctgactatctctccgcagcagccccgaggcggtgcgcggtcgtgcgcggcggttcgcttcccgcgtgacggtttgcttcttccgcactcggagaccagcacaccatctgcatgacttgtgggcccgggcccccatgtcagagactgggccgcatgggcgctaggtgcgcgtcggacgggatttcctggggcacaagcgagagagtcttccttgaaaagggattcaccccgcgtgcagcagttacgctttcgcattctttccaactgctgcgccctttcgcctccgagccctctgcgcccctttgcattcgtgctcttctgctttccgctgtcgtagtctccatggcctcgctggttcatcccgagcatttccagtccgagggggcactcaacctggtgcgcaacctgctcggatggagcgcgtcggcgttcgctggaaggatccgcgccggcgccactcccctcggcgatctcgccaccggggagttcgtgctcttcgtctcctacctctcctgcaggttggcgctactgatctcgcctttcttcctgctgctgctggaggagctcggccttcagcttcaacacctcacgccccactccatcctctaagcggccatcttcacccacctgtgcgagatgttcgtgggggtggcgccctgtacctccctcttccgccatttcttcgtgctggtgatgtccgggaaggccaaggaccatctcggcgcctactac

SEQ ID NO: 267 - DNA, 5943 bp, Artificial Sequence
  cDNA encoded by ZmNC262Av2c_OGOO1508HC.1
atggagttcgcaactggagcgctaggcacccttcttctcaagctctccatgctgcttcatggtgagtacaacctggagaagggcgtcaggggggacatccagcgcgtcatgaacaagctcgagcgggttcattctgtcctcggccatgttgtcgaagtgcctgtgccactgaagccacgtcctgatctggtcagaatgttggcacgcagcgtcagggagctatcctacgacatggaggacttcgtcgacaccttcctggtgcgtgtccaaggccctgaacgcaccagcaaaagaagcgccaaaatattcatgaataagacatatatggtcgtgaatcgccatgagatcgcccagaccatcaaggacttcgaagagcgcgtccagcagatagatgagcgtcgtcaaaggtacgatgttgatgctatggttccccgtgtcaaaaccttggttgatcctcgcatatttgctctgaagtacaccaaggccacggaccttgtcggcatggatgaggcaagggaggaactaatcacaaggttgaccaaggaagatgacacctccactgaacaaaggcgagtctctatcgttggttttggaggacttggcaagacagcgcttgcaaaagcagtttatgacaaacttaaagctaaaggggaattccattgcgcggcctttgtgtcggtgtctcggtttcctcagctcgaaaaattcttcaaggaattgctttatgagcttgacgagactgagtacaaggaacttattgacatcagcaccccattggaacttatgaatctagtgcatgaattccttcataataagaggtaccttattgctgtcgatgacatatgggatactgacgcatgggcaatgatacaatgggcttttcctgagaataagctaggaagcagaataatcgcaactactcgcagaattgatgttgctgagtatgtaggtggttgctatatgatgaaacctcttactcgagagaaatcaaatatattattctatggacgaatatttggctctgaaggtaaatgtcctcctgaactttctgatgcgtctgagaaaatattgaataaatgcggaggcgtgccattggctattattactacatctagcttgctggctagtaagtcaagaaacataaaagaatggtacaatgttgctgattctattggttccagaatactaaaaaacagtactgaaatggagaatttgaggaacatactgctgcttagctattatgatctaccagcacgattaaagacatgtttgttatatctgagtattttccctgaagattgtgagattgggatgcatcggttaatatggaggtggatagctgaaggttttttcaatggagaactagcacatgatgggctctttaaccttggcgaatcttgtttccacgagctcataagaagaagcatggtgcagccagtaacacttgaaggcacgggtcttgtatatgcttgtcgtgttcataatatgtttcatgatttgatcctctacatgtcacacgaagaagaatttgtttctgcagtcaatgaaaagtttggtcttctagatgttcgttctcggcggttagcattccagaacataacaaaagagcagtacagacttgtggaacatccacggctggcacaattgaggtcacttaatgccattggatgtcctatatacgcgatacctccaattgaaagctataaattattgcgtgtactggatttcgaaaattgtgcaggtattgaaggccatgatcttgttcatcttgggaaattgcatcacctcaagttccttgggctaagaaacacgtttatcggtaagctgccggaaggaatagggaacctcaagtttctgcaaacattggacctcgatggaactggtgtggaagaattacctcaagccttgcataatcttacagaattgatgtgtctaattgctgactggagaacgagagtgcccaattggattggtaacctcacgtccctgcagcacttggtgatttatcctggtgggcatgacgatgaggattctgcgagcaggtttgttaatgagctgggaaagctgagacaactaagggtgctccgttttttgataaaagcacaagatgaatggcagctgagagatttgctagagtccctatcgaatctgccagagatcgaggctatacattttgattactatggagtacagttaaatagaggtgttcagttggaacctgaaggctatgccctctctagacatattcgttccatggaattgcgctggttggagttctcaaggctgcctctttggattaatcctggacatcttcctaacctctaccacttatggctgatggtatctgaggcggaagaacgggatctggaaatccttggggggtttccagtgcttcactccctccacttgttgattgtgaatactgaacgtgaagatgtcatgacttgtggctgtggtggattcaagaatttgaaatgctgcagtataactaaaccgctgaaatttgtacatggagctatgcccaggcttgaagtcctcgatttccatttcagtgtgcaactcctaacggattcaaaccaagattttgattttgactttggcttgggaaacctacattggcttcagcaagccatcgttcaaatcacagcccttggtgaggaggtggagtctgtggggagagcacaggtggctctgcgggatgcaatacgtacccatcccaaccgtcctacccttgaaataaacttatttgggcaaacaatacctccagagttaccaaagcaagacgacgatggagcgaaaattgtggagatatcaccggccgagagtagtcgtcaagctcaagagcgggagaaaagaagcatcgatgtggcgacgaagaaagcaacacgggtgccgtctttttacacaaagtcatcaattgatgagccaatggatcagctcataaacatgctatctgtggttgatgacgaagcctacactaagaacataaagatactatctattgtaaggtctgagggactggggaagactactctggcccaaaaagcattcgaagagctccattcgcaatttgaccgtggggcgttcgttctactaggccagaatcctgacttgaggagagtttttgctgacattctccgtggtcttgacaagcaaaggtacatagatttcccagtggcaatattggatctagtggacctgatctggctagtccgtaaatcgctcataaacaaaaggttctttattgtatttgatgatatatgtgatgtaaaagcatgggaaattataaagtgcgctttgattgaaaataacaaccacagtgtagttcttacgacaagtcgcaacactggtattactgaaattattggtggcagcaagcaattacaacctctatcagcaactatctctaaaaatctactctgcaaaaggttatttggatcggcaggcaagtgtccttctgaactagtaaatatatgtgacaatcttgtagaagaatgtggtggaatactatctgtgatcgacgaaactgtgacattgcttgcaagtataccaccaacagtggagaactgggaggcagtgtacgccagaagaatgttggatcggtcttatcctggtttaactgacagtctaaagaattgcttactctattttactatgtttcgaagaggacatgagattagtggagaacacttaatatgtgcatggatagctgaaggttttgtacatgggcaagaggtagcagagacctaccttagtgatctagtaaaaaagaaattaatcgatgcagtggaggttgatgctggaggaaaggtcctcacgtgccgcatgtatgacttggtgcatgactttatcgtctcaaaatcaattgaagaacgatttgtttatattttaaatgactcggaaggcagagatttgtcagaagcagttcacgttcaccagcgactatacatccagggacataataacaaagaactagacctgcaaattccttggctgccccaagtgaagtcacttgtctcctgtggtactgcgccatccatcttaaagtttaagggtctacatgttatggatttaggggcctgtgaatctttgcaggctagtcatctcaagggtataaataatgtaagttctttgagatatctggtcataggaggtaagtgtatctctggcatccctaaggaaattgcgaagctggaacatttgcggacactagatttaagtgcaagtggtctaaatgaattgccagaatatgttttcatgataagaaaattggaacgcctaattgttaatagtcagatgaagatatcatatggtattgcaaagatgtctgctttacaggagctaggcgatatcaatgtcaccgacccagagttgctgaaaagtctctgtaagctaaccaaattgagggttcttagaatttccatatggtcatgggatgatagtttgaagaactattttaaacaactgtgtgacaacttgcgttcactggttcagtgcacggagaacatccagagtctctccataatgacatgctgctccctggttttcatggatgatttgggtgagaattggacccctcaatgtctccagaagctcgaggtcggttgcagcgcatttgacatattgccaagttggtttggctcactttctagtatcttcacgttaacaatcgaggtctacaagttgtcacaggacataattgatacgctcggaaggctgcctggtcttggttctctatccctgacatcgaaacaagaaccaaaaggatactttgtgatcggctctgacaggttcagtaagctagagagcttaaagtttgtgagcaatgcaatggtagagatgtttccacgtcaacaatcaaatggcacggaacagctcaaaaggctcatgattgtgttccatgcttcacgtacacaagatgtgaacaaagatttctgctttggtttggagaacctgtcttccctagagcatgttcgtgttgaaataatttgtttcgatgccagccataacatggtgaaaaacgcagaagctgcagttcggaaagctatatctggcacaagtatcccaaatctggaaatacgaagacttcaggaaaatagtatgatacaggacgaagcggacctctgtgatgcagtacaagagcagaataatcagaagcaccagaaaatgaagagttctatggagtcccaggatgggtacctcacttctttaccgaaccaggaaagtgcagatgttgttggctccgataatattgtggaagttcataataaagtgatagagttaccactagtgaatgaaatgaacttgcagacgattaagagggatcaatactataatttcagtgaagatgaggacttaatgttggtttctagctaccttaataaggaagtgaatatctttcaaggttactatgatgccatagaaaggaaaaatcacagtggccagacaagtgatgacaagcatgctgaagcagaagtagaattccgagaaaaacaagggaaggctttttctgtattccatgtgtggatgattctaaggcatgagccaaagtgggcatttagagaatcaaagatcaaagaccagcatgaagcaaacaatgctaatactgatgctcctgccaacatttatagaccacaggggaggaaagctgagaaggaaaaggctcgtgtgagaaagcatggtggatctgatgttgatggtgatccgttcattgaagaagtaaaaaatatgagggaagcacgggaagaaacagaacgagaccgaaagacccatgatgacaagttctatgagttggaaaagagtaagcttgaattggagcgagatcgacatgacaaagagataatgcaaacagacacaagcacaatggatgaagaatcgaaacaatacttcaagttgatgaaacaagagattttggctcgccgtttcgggagtagtcagccatag

SEQ ID NO: 268 - protein, 1980 aa, Zea mays
MEFATGALGTLLLKLSMLLHGEYNLEKGVRGDIQRVMNKLERVHSVLGHVVEVPVPLKPRPDLVRMLARSVRELSYDMEDFVDTFLVRVQGPERTSKRSAKIFMNKTYMVVNRHEIAQTIKDFEERVQQIDERRQRYDVDAMVPRVKTLVDPRIFALKYTKATDLVGMDEAREELITRLTKEDDTSTEQRRVSIVGFGGLGKTALAKAVYDKLKAKGEFHCAAFVSVSRFPQLEKFFKELLYELDETEYKELIDISTPLELMNLVHEFLHNKRYLIAVDDIWDTDAWAMIQWAFPENKLGSRIIATTRRIDVAEYVGGCYMMKPLTREKSNILFYGRIFGSEGKCPPELSDASEKILNKCGGVPLAIITTSSLLASKSRNIKEWYNVADSIGSRILKNSTEMENLRNILLLSYYDLPARLKTCLLYLSIFPEDCEIGMHRLIWRWIAEGFFNGELAHDGLFNLGESCFHELIRRSMVQPVTLEGTGLVYACRVHNMFHDLILYMSHEEEFVSAVNEKFGLLDVRSRRLAFQNITKEQYRLVEHPRLAQLRSLNAIGCPIYAIPPIESYKLLRVLDFENCAGIEGHDLVHLGKLHHLKFLGLRNTFIGKLPEGIGNLKFLQTLDLDGTGVEELPQALHNLTELMCLIADWRTRVPNWIGNLTSLQHLVIYPGGHDDEDSASRFVNELGKLRQLRVLRFLIKAQDEWQLRDLLESLSNLPEIEAIHFDYYGVQLNRGVQLEPEGYALSRHIRSMELRWLEFSRLPLWINPGHLPNLYHLWLMVSEAEERDLEILGGFPVLHSLHLLIVNTEREDVMTCGCGGFKNLKCCSITKPLKFVHGAMPRLEVLDFHFSVQLLTDSNQDFDFDFGLGNLHWLQQAIVQITALGEEVESVGRAQVALRDAIRTHPNRPTLEINLFGQTIPPELPKQDDDGAKIVEISPAESSRQAQEREKRSIDVATKKATRVPSFYTKSSIDEPMDQLINMLSVVDDEAYTKNIKILSIVRSEGLGKTTLAQKAFEELHSQFDRGAFVLLGQNPDLRRVFADILRGLDKQRYIDFPVAILDLVDLIWLVRKSLINKRFFIVFDDICDVKAWEIIKCALIENNNHSVVLTTSRNTGITEIIGGSKQLQPLSATISKNLLCKRLFGSAGKCPSELVNICDNLVEECGGILSVIDETVTLLASIPPTVENWEAVYARRMLDRSYPGLTDSLKNCLLYFTMFRRGHEISGEHLICAWIAEGFVHGQEVAETYLSDLVKKKLIDAVEVDAGGKVLTCRMYDLVHDFIVSKSIEERFVYILNDSEGRDLSEAVHVHQRLYIQGHNNKELDLQIPWLPQVKSLVSCGTAPSILKFKGLHVMDLGACESLQASHLKGINNVSSLRYLVIGGKCISGIPKEIAKLEHLRTLDLSASGLNELPEYVFMIRKLERLIVNSQMKISYGIAKMSALQELGDINVTDPELLKSLCKLTKLRVLRISIWSWDDSLKNYFKQLCDNLRSLVQCTENIQSLSIMTCCSLVFMDDLGENWTPQCLQKLEVGCSAFDILPSWFGSLSSIFTLTIEVYKLSQDIIDTLGRLPGLGSLSLTSKQEPKGYFVIGSDRFSKLESLKFVSNAMVEMFPRQQSNGTEQLKRLMIVFHASRTQDVNKDFCFGLENLSSLEHVRVEIICFDASHNMVKNAEAAVRKAISGTSIPNLEIRRLQENSMIQDEADLCDAVQEQNNQKHQKMKSSMESQDGYLTSLPNQESADVVGSDNIVEVHNKVIELPLVNEMNLQTIKRDQYYNFSEDEDLMLVSSYLNKEVNIFQGYYDAIERKNHSGQTSDDKHAEAEVEFREKQGKAFSVFHVWMILRHEPKWAFRESKIKDQHEANNANTDAPANIYRPQGRKAEKEKARVRKHGGSDVDGDPFIEEVKNMREAREETERDRKTHDDKFYELEKSKLELERDRHDKEIMQTDTSTMDEESKQYFKLMKQEILARRFGSSQP

SEQ ID NO: 269 - DNA, 9402 bp, Zea mays
gtattctttgccgagtgtctaacctaggatactcggcaaagtgtatttaaaaattaaaaaaaaatctttgtcgagtgccagatcgcgtgcactcggcaaatatattgtacatatcaaaatccaacctcttttctgtcacacactctctctcacttctctcttctctctcacgccgcgccgctgccgcctctcacctagccgccgttgcccgagcgtgccgcttgcccaccctcgcgcagccgctcgcccgccctcgcaccttcaccggccgacctcatgccgccgtcgaccaccctcatgccgctggtcgccattcgccgtcgccggccggtgagcacataagtaataatatttgcatataattattgtttctagggagataagtacattggttaagagcctaatgcattagatttgtttaaggagtgtcattacaataggaaaaaggaatgctacatatctaccgcgctttatgagaagaaatgatgacatatctaataggagcagttctaatctcaagtacatacgcctgggccgagtgttacactcggcaaagagactctttgccaagtgtcaaggtcatagcactcggcacacctggacaccggtaaagtctctttgccgagtgttgtggccttggcactcggcaaagaagcaaactttaccgagtgtctcctagtgcactccgcaaaaggaactgacaaaggggtccgccagcgatctctttgccgagtgctagtccggcggccactcggcaaagagggagtctttgtcgagtgccacccaatacgctcggcaaaggacctagtaaaggagcccacagggagcttcttttgccgagtgtctgtacagtggacactcggcaaagagtgagcctttgccgattgtcactttgtgacactcggtacaggctccattgccgttacctgacgccgtgacgtcgacttttctttgccgagtagcgagtgatactcgacaaagactttgtcgagtgcccgataaaaagtacttggcaaagaaactattgccgatgtacagttcgctgagctttatttgccgagtgtcacactcgacaaagccttcgttgaatgttttccaggctttaccaaatgcttcagacacttggcaaagaagctgattctggtagtgataccaacttcgatcgcacgtgaaattgtagtttataatacaaatttaaataggtttaaaagttatttgtaatctatatgagaaataaaatgatttatctaagagttcgtaacttgaatttcacgattttctaaagcttttaaatagatttaaaaaatatttgtaatctatatgagaaataaaataatttatctaaaagttcgtaacttgaatttcaccattttcgaaagcttctaataatctgtttcaccaacttaactagattttgtgaagccccatcagcatagtggaccgcgaaatattcctcagcatctttccgtacccccttggcaccttggaccattgcggttgtagccctgcaacatatagcacatatctcaaaagccaaggtaaaggagaccctgttggtggtggtggtcgtcgtcggtgactcaggtgggatagattccctggtgtgtgtggtgggcgtgcaaattattgatcgctcacggtcccaaacacaatcatgcaaagagagatgtgatcctctccaagaaatgccatgcatgcccaccatctcactgctgctggcacacacatatatatcgtcgtcgatctgcaaccttagcttcaaccaaaggtacggtagtagtagtttccctgctgcaacagcttggcatggcgcccaagcttcctgtgctacgacaagcaaggtggctgccgctgctttttcttattaccaactttgttgtgctgcagttacaatgctcctatgggcttccgctccagaatgaaccgagacaagtaagctagctctgttttttcccctttccttgtgatcttggtttggtcaccttcatgcatcttggtactaccgccggcaaaatgccatgcttcagcacccccactcctccaaaaaagtaaaactacactaaagtaacggaagttattttcgacagtagcacggggcgactcggcatccgaccgtggcggcgcgtgcacgggaatcagagagagagggaagagaaagggagaacacaaccgtataaatgagttatttttcgacggctagagttacgagtgtcgaaaattatatctatttttagtggttagaggacagccgtcgaaaataatcaaagtcaccaaaaataataaaagctgccgaaaataacatattatttttaacggtagttctctgagcgccgaaaataactgtcactcttgttgtgctaataagatggaaagaaaaataccttttgattcttttattggttttgttactaattttacggtagtgggaatcgatgtgcgttggcggtctcttacctcaaatcaagcagtgggacgaaaaatacaaagtatactagactgtgagtattaaaaaacaaaaagaaaaatttattttaaaataaagaattcacaaccattatcggaatctagctccgagtgctttctatcaggcactcgacaaagtcctactcttggtaacgaccacgtttaccgaaagcaggactctcgacatagagaaacactcggcaaggaacgctttgccgagtgccgaacactcgacgaacagagacgatgtacagttcgccgagctttctttgccgaatgttgtcacactcggcaaagccttcgccgaatgttttacagacttcagacactcggcaaagaaattgtttcgggtagtgaatatgattacattatatcaattggtttctctattgtctaccacctgggaaacactttttcagctccattctgtgcaaaagttgaccaaagagctccatgaaatcattgtagcaggtttgaaccgattgttcaagtcacgagtacaataatatacatagccaaaggcacacccaatttagctttaatttataaaatcgcctgagtagtatggacgtggatagcaccagtttttctagtttgtagggaaaaatataaactaacagccaagaaattaattcatatgagcatcttttcgacgactatcttgagtagtttctagggactgacacttagctactattttttccatccaaccaggtaaaacgaagaatatatataccataaattatttgataaaatgaacctatgtccaagaagcaataaaatatgtggagttatttcttacatgattaacttaattactttcgatatgtttaactctaaaaattacttctatgtgtgattattagctaacttacgtgatggaaacatgcacataccgaacagatatacttccatgcatgtgtcacgtttttaagaaccataagtgttaggagtcgatagaaataattatttttacagacgagtaaattagaatcgctagtggaaatcgattttcactggtggttgatataataaaaccttcaataataatttttttaggattcataagcgaggttttaaaatcgcaaaaaaatattataattaagggaagcctcacccaagtttggtccattgaagttgaaagtcatggtatttttcgcgtgctacgtggtgggtgggaatcaaacttgcgaccttagcctcacacataccgtacgttaccactctactcatcaattacttcatgtttatatggtagttttgttgggcatatattataatcaactgtgtgtaaattgattatttcagtccgtaaagaaatttaaacaaaaaagttgttttgaagttcaataacttttattttagtacttttcacatctgaggtcgtttgcaaaatttctattttaaatttgaaaaatttagatacactttttgaaaacccaaaatgatttcaaataaaaaaacaattaactacaaagttttataacttttagagatctacaacttttatttcggtagtattccatataaggtcatttggaaataacaaaaaattcaggatataaatgatttgtagtagcagttacttagtaattcgtctataaaatcatggatttttagtaaaaatgatttttaaagacggttttcttaataaattaaaacactagtacaagcattactggcgtttaatatccgaaaccgccgtgtgagatacataaaaaatattatgcattccatggcggcagaatcaacaaattgcgtttacagcttgtctatactgacgaggggttgatggtgtgtgtgtgtgtttcagatatacatcgtctaccttggtgggcgacaaagtgacgatgctgatcttgtcactgcttcccaccatgacctccttgcgtctgttgtcggcaggtaattaactctatatacaaattgatataaacccaagttttaatgcatataaactacttgtctgtacgtgcattctgaagcaagcaagaagcggtagagtcgattatctacagctatagacatggattctccggcttcgctgctttgctcacgaaatcacagtctatacagattgcaggtactgataaatatatataaaaaaagatatatattttctacacatatcatcatgtttaatgttttctgctggcaggtctgcctggcgtggttagtgtaacgaaaaaccgagtccaccagacacgcacaactcgaagctgggactttgtggggctgcactacaacgatcagccaaacggtttgctcgcaaaggcggctaaatacggagacgacgtcattgtcggcgtcatcgactcaggcttctggccagagtcgcctagctacgctgaccacggctacggcccccctccttcgcgatggaagggagtctgccaaggcggcgacgacggctcgttcggcccgaataactgcaaccgcaaggtcataggggcgcggtggtacgctgccggcgtgagcgacgacaaggagaggctcaagggcgagtacatgtcccccagggacgccgaaggccacggaacccacacctcctccacggcggccggcaacgtcgtcggcaacgtcagcttccacgggctggcggccggcgcggcgcgaggcggcgcgcctcgcgccaggctcgctatttacaaggcctgctggggcgcgcccccgttgtcgggctcgtgcgacgacgccgatgtgatgaaggccatggacgatgccgtccacgatggcgttgacgtcctctcggtctctatcggcgggccctctgagacgccgggcacgttgcatgtcgtcgcgagtggggtcacggttgtctacgccgctgggaatgatgggcctgtcgcccagatggtggagaactcgtccccgtggctgttcaccgtcgccgcaacgactgtggataggatgttccccacagccatcaccctgggaaacaaccagattgtgcatggtacgtgcatacactagctagattctatgatgttatcttaggagtttgtccatatttgacaaccaattaacatcgcgcacaagtcgctgatgattttttttaaggtcaatccttatacgtggggacgcaagggagagaagatcatttccacgaggtcgtgcccatggtgaactcagggtatatatgattgattcgtacactaaccaatgtcaattattcaccaacgaattgttcatgtgttaaataaaactgagaataatatgtcaatgaatatttggcatacatataataatgagtattgaaacgtcggtgtatatacatacagttgtgatccagagtatgtaaacagcagcgatgtgaaggggaagattgtcttctgcatcacagaggacagcttgaatccatctgctacagttactgctgttggacagctagtgttggagaatggagggaaagggttcatattcacgggatataacagggacaatatcgttcggtgggaacctgttacaagcaaaatgataccgttcattttaatcgatcttgaggtcgcctaccacatcttgcagtactgcatgtacgtacgtaaacactgatcgattaacatatattacatcgatgctggttaattatatcacattttttatatttttttttatttcgatgcaccacaccactaaactaatcctctgaagcagctcaactgacggtaccccaagagcaaagatctctttggctcaaacaacttttggaactggggttcctgcccccaaggtagcagtgttctcgtctagaggacctagtgccgtctatccaggcgttcttaaggtaccctagctaccttctatatataattctctgtcttggcattcatcccatccatttcttctacaacaatcctcttcaaactaacattattgtttccatgcatacacatgaataatattcaacagcctgatatagctgcacctggggtgaacatcttagctgccgccccacaaattccttattacaaagagcagctgggtggcgtcctgtaccattttgagtctggaacatccatggctacccctcatgtgtctggtatcgtcgccctgcttaaatcattgcatcctgactggtcacctgcggccctcaaatcggcgctcatgacaactggtatgtgtattaaataatctcgccttgctagcttaaacaaccatgtccaatacaagcattgtcttaaacaacattgttattgtccccctgcatgcagcacttaccaccgacaacaacgggatcccgatacaagcagatggaaacccagtaaagatcgccgacgctttcgattacggagcagggtttgtcaacccaaccaaggctgacgatcccggtctcatatacgacatccaaccgtcagattacctcaggttcttcgactgcacgggagggttgggtaccaacgacagctgcacgacacctagggcatctgttgtagacctcaaccttccgtcgatcgcaatccctagtctcaaggcgccccaaaccgtcacgcgcaccgtcaccaacgttgggcgccagactaacgcagtgtacagagcagtcctccagccgcctccgggcgtggagatgtccgttgaaccgtcggtcttggtcttcgatgccaagaggaaagcacagagcttcaaggtggctttcatggcgacgcgtcggttccagggtgactacaccttcggtagcttggcatggcacgacggaggcagccactgggttcggatcccgattgcggtccgcatcgtaatccaggatttgtattcgaccgtctcttgaatcgatcccattgcggaaatcgtctagaaaaagaaataattaatgttatatgaagctagcgagtttccataaggaaccctcgctcgtggtggcaagatggtatttggtgcatatatatgaaaaatatatatccttaagtttgcttgagttatttatttgttttgatttctctaagatcttcgcttttgagattgatttcagtgatcgatgtctcagtacaacattatcgaattatagcaaactaggctctaaaatggttaacatgaaactataagatataccttgcaatatgttggacaggagactttgcagtagcaagtcagcaacctcagtcagggtgggggatggtaaattggtaagtcttctttgttctgggaaagtgcctggctaaggggtatgacacctagagacaccttccctttgacctactccatttctaacggcaaaaatagatccatccatgaggctctctcaaacaaccgatggattcaggacctacattttaatcacaatgatttttctgccgcgcacatacatgaatattgtcaattatggtgcgaggtaaatcagtttcgcttagtgcataataccccgaccttatcaagtggaagtttactatgagtggccagtacacaactcagtcagcctaccaagcgcagttctggggctccacatgcatgaattttaatagtataatttggagagcttgggcgtcaccaaagtgcaaattcttcagttggcttgctgttcaaaatagagtttggacagcagacaggttggcaagaaggggatggcctcataatccgcgttgtgtcctatgcgcctcatgcccagaatctggactacatctttttgttgaatgttgcttcaccagacatatttgggctgatttgaatctgtgggttgcaattacggagatccaccattcttcttggcaacctgtaggttcggtgcaccaatggtggtcaaatcttgcaacatccacagtcagaagcgtgaagggattgcaaactctcatcattctcgtgtcttggacagtttggtgtgagagaaactcgcgaatctttgagcacaaagagaagaccgtgacacagactataacgatgattaaggagcaaatccgcctgtggattctaggaggagcaaaacacttagcaaggctactgtaggttttagggaaggggagggggttggttttgggacatttgtgtcaccatacttaatgtctccttccctagtgtgatgtacttgtatattttagcccttgctggctttcatcttctttttaatataacaggcaattctcttgccagttttcaaaaaaaacgaaactataagatctggtcaatgtgcctacactaccgaaaatagcttctttgccgagtgtctgaagcctggaaaacactcgagaaggatttgccgagtgtgacactcgatgaaggctttgtcgactgtgacactcgacaaaaaaggctcggtgaactgtacatcggtaacggtttctttgtcgagtactttttatcgggctttgccgagtgccgctcggtactggacaaagaaatgttgccgttacggcgccaggtgacggcatcggagcctatgctcacaccaacgaaaacatctcatctcacaccatccctcatcaaccacaccttaacaccaccataactcatttgtaatccatatactccagtgcagttccaatacacagcctcaacaggaagtaggatgttacgcgcatcctagcggtccgaacctgtataaatccttgtgcaagcctgacgtgttcctgcacgtactatcgagtcacagtcaataacatcgtcctactcaaaagcatcacgtgggtaaccccatggtgtgcggacaataagtgataggtagagtggtattgtgggttacacgcgagggtgaggtcaagggtttgattccccttggtcgcgtgccacgtgattcttgcgcgaaaatgtcgcgaatattgcagggtggtggcttctctaattaaaatatttttttgctattttaaagcctattttatgttttctggaaaagtttttacctcgcagttttattaactcgatcgtgagtaaaaatcgatttccattgacggttttcttagcccaactggtagtgaaaatcgctttctattgacggttctcagttacccacctata

SEQ ID NO: 270 - DNA, 2331 bp, Artificial Sequence
  cDNA encoded by ZmNC262Av2c_OGOO1512HC.1
atggcgcccaagcttcctgtgctacgacaagcaaggtggctgccgctgctttttcttattaccaactttgttgtgctgcagttacaatgctcctatgggcttccgctccagaatgaaccgagacaaatatacatcgtctaccttggtgggcgacaaagtgacgatgctgatcttgtcactgcttcccaccatgacctccttgcgtctgttgtcggcagcaagcaagaagcggtagagtcgattatctacagctatagacatggattctccggcttcgctgctttgctcacgaaatcacagtctatacagattgcaggtctgcctggcgtggttagtgtaacgaaaaaccgagtccaccagacacgcacaactcgaagctgggactttgtggggctgcactacaacgatcagccaaacggtttgctcgcaaaggcggctaaatacggagacgacgtcattgtcggcgtcatcgactcaggcttctggccagagtcgcctagctacgctgaccacggctacggcccccctccttcgcgatggaagggagtctgccaaggcggcgacgacggctcgttcggcccgaataactgcaaccgcaaggtcataggggcgcggtggtacgctgccggcgtgagcgacgacaaggagaggctcaagggcgagtacatgtcccccagggacgccgaaggccacggaacccacacctcctccacggcggccggcaacgtcgtcggcaacgtcagcttccacgggctggcggccggcgcggcgcgaggcggcgcgcctcgcgccaggctcgctatttacaaggcctgctggggcgcgcccccgttgtcgggctcgtgcgacgacgccgatgtgatgaaggccatggacgatgccgtccacgatggcgttgacgtcctctcggtctctatcggcgggccctctgagacgccgggcacgttgcatgtcgtcgcgagtggggtcacggttgtctacgccgctgggaatgatgggcctgtcgcccagatggtggagaactcgtccccgtggctgttcaccgtcgccgcaacgactgtggataggatgttccccacagccatcaccctgggaaacaaccagattgtgcatggtcaatccttatacgtggggacgcaagggagagaagatcatttccacgaggtcgtgcccatggtgaactcaggttgtgatccagagtatgtaaacagcagcgatgtgaaggggaagattgtcttctgcatcacagaggacagcttgaatccatctgctacagttactgctgttggacagctagtgttggagaatggagggaaagggttcatattcacgggatataacagggacaatatcgttcggtgggaacctgttacaagcaaaatgataccgttcattttaatcgatcttgaggtcgcctaccacatcttgcagtactgcatcagctcaactgacggtaccccaagagcaaagatctctttggctcaaacaacttttggaactggggttcctgcccccaaggtagcagtgttctcgtctagaggacctagtgccgtctatccaggcgttcttaagcctgatatagctgcacctggggtgaacatcttagctgccgccccacaaattccttattacaaagagcagctgggtggcgtcctgtaccattttgagtctggaacatccatggctacccctcatgtgtctggtatcgtcgccctgcttaaatcattgcatcctgactggtcacctgcggccctcaaatcggcgctcatgacaactgcacttaccaccgacaacaacgggatcccgatacaagcagatggaaacccagtaaagatcgccgacgctttcgattacggagcagggtttgtcaacccaaccaaggctgacgatcccggtctcatatacgacatccaaccgtcagattacctcaggttcttcgactgcacgggagggttgggtaccaacgacagctgcacgacacctagggcatctgttgtagacctcaaccttccgtcgatcgcaatccctagtctcaaggcgccccaaaccgtcacgcgcaccgtcaccaacgttgggcgccagactaacgcagtgtacagagcagtcctccagccgcctccgggcgtggagatgtccgttgaaccgtcggtcttggtcttcgatgccaagaggaaagcacagagcttcaaggtggctttcatggcgacgcgtcggttccagggtgactacaccttcggtagcttggcatggcacgacggaggcagccactgggttcggatcccgattgcggtccgcatcgtaatccaggatttgtattcgaccgtctcttga

SEQ ID NO: 271 - protein, 776 aa, Zea mays
MAPKLPVLRQARWLPLLFLITNFVVLQLQCSYGLPLQNEPRQIYIVYLGGRQSDDADLVTASHHDLLASVVGSKQEAVESIIYSYRHGFSGFAALLTKSQSIQIAGLPGVVSVTKNRVHQTRTTRSWDFVGLHYNDQPNGLLAKAAKYGDDVIVGVIDSGFWPESPSYADHGYGPPPSRWKGVCQGGDDGSFGPNNCNRKVIGARWYAAGVSDDKERLKGEYMSPRDAEGHGTHTSSTAAGNVVGNVSFHGLAAGAARGGAPRARLAIYKACWGAPPLSGSCDDADVMKAMDDAVHDGVDVLSVSIGGPSETPGTLHVVASGVTVVYAAGNDGPVAQMVENSSPWLFTVAATTVDRMFPTAITLGNNQIVHGQSLYVGTQGREDHFHEVVPMVNSGCDPEYVNSSDVKGKIVFCITEDSLNPSATVTAVGQLVLENGGKGFIFTGYNRDNIVRWEPVTSKMIPFILIDLEVAYHILQYCISSTDGTPRAKISLAQTTFGTGVPAPKVAVFSSRGPSAVYPGVLKPDIAAPGVNILAAAPQIPYYKEQLGGVLYHFESGTSMATPHVSGIVALLKSLHPDWSPAALKSALMTTALTTDNNGIPIQADGNPVKIADAFDYGAGFVNPTKADDPGLIYDIQPSDYLRFFDCTGGLGTNDSCTTPRASVVDLNLPSIAIPSLKAPQTVTRTVTNVGRQTNAVYRAVLQPPPGVEMSVEPSVLVFDAKRKAQSFKVAFMATRRFQGDYTFGSLAWHDGGSHWVRIPIAVRIVIQDLYSTVS

SEQ ID NO: 272 - DNA, 147501 bp, Zea mays
cattgaacctccagaatcttgcgaatcacatccatgacgacatttaacgaaggcctactataactctttacctgttgctgctgagattctatcgatccatctcaaagccatgttttactcttatgtcctatatttgaagatagtacctagtttaagacctctcttggagatgctctcaagggccgaactttataagaaaatacaagagaaataattttatttgacatcgttgtattgtaggagtggaaaattagtacctcttcattttctggtgcttctgattattctgctcttgtactgcatcacagaggtccgcttcgtcctgtatcatactattttcctgaagtcttcgtatttccagatttgggatacttgtgccagatatagctttccgaactgcagcttctgcgtttttcaccatgttatggctggcatcgaaacaaattatttcaacacgaacatgctctagggaagacaggttctccaaaccaaagcagaaatctttgttcacatcttgtgtacgtgaagcatggaacacaatcatgagccttttgagctgttccgtgccatttgattgttgacgtggaaacatctctaccattgcattgctcacaaactttaagctctctagcttactgaacctgtcagagccgatcacaaagtatccttttggttcttgtttcgatgtcagggatagagaaccaagaccaggcagccttccgagcgtatcaattatgtcctgtgacaacttgtagacctcgattgttaacgtgaagatactagaaagtgagccaaaccaacttggcaatatgtcaaatgcgctgcaaccgacctcgagcttctggagacattgaggggtccaattctcacccaaatcatccatgaaaaccagggagcagcatgtcattatggagagactctggatgttctccgtgcactgaaccagtgaacgcaagttgtcacacagttgtttaaaatagttcttcaaactatcatcccatgaccatatggaaattctaagaaccctcaatttggttagcttacagagacttttcagcaactctgggtcggtgacattgatatcgcctagctcctgtaaagcagacatctttgcaataccatatgatatcttcatctgactattaacaattaggcgttccaattttcttatcatgaaaacatattctggcaattcatttagaccacttgcacttaaatctagtgtccgcaaatgttccagcttcgcaatttccttagggatgccagagatacacttacctcctatgaccagatatctcaaagaacttacattatttatacccttgagatgactagcctgcaaagattcacaggcccctaaatccataacatgtagacccttaaactttaagatggatggcgcagtaccacaggagacaagtgacttcacttggggcagccaaggaatttgcaggtctagttctttgttattatgtccctggatgtatagtcgctggtgaacgtgaactgcttctgacaaatctctgccttccgagtcatttaaaatataaacaaatcgttcttcaattgattttgagacgataaagtcatgcaccaagtcatacatgcggcacgtgaggacctttcctccagcatcaacctccactgcatcgattaatttcttttttactagatcactaaggtaggtctctgctacctcttgcccatgtacaaaaccttcagctatccatgcacatattaagtgttctccactaatctcatgtcctcttcgaaacatagtaaaatagagtaagcaattctttagactgtcagttaaaccaggataagaccgatccaacattcttctggcgtacactgcctcccagttctccactgttggtggtatacttgcaagcaatgtcacagtttcgtcgatcacagatagtattccaccacattcttctacaagattgtcacatatatttactagttcagaaggacacttgcctgccgatccaaataaccttttgcagagtagatttttagagatagttgctgatagaggttgtaattgcttgctgccaccaataatttcagtaataccagtgttgcgacttgtcgtaagaactacactgtggttgttattttcaatcaaagcgcactttataatttcccatgcttttacatcacatatatcatcaaatacaataaagaacctggaaaaataatagtatccaagggttataatccatatttagtagtaactactactgacaacaactgtagcaaaaatggtctcttatgtcatatttcggtgcttcgttttggtgattgattgacacacaacacttagattaacaatgttttctagatgtatattctcaggtttataggtctatgggatgaaatgctgaagacaccaagaagaaccaagtcaaacaaagcaaaatcagataaatcaatactcaccggtttaaccggcagtgtcgaaataacactcatggatataacacacagattttttttagtacacgagtgattagaattttgaagaaaaaataatcaaccacgtcaaataaaaaaaaagaacggagacaatatattgagcaaatatatagctgaataaaggtagtactagcatgttagtgggttggacataccttttgtttatgagcgatttacggactagccagatcaggtccactagatccaatattgccactgggaaatctatgtacctttgcttgtcaagaccacggagaatgtcagcaaaaactctcctcaagtcaggattctggcctagtagaacgaacgccccacggtcaaattgcgaatggagctcttcgaatgctttttgggccagagtagtcttccccagtccctcagaccttacaatagatagtatctttatgttcttagtgtaggcttcgtcatcaaccacagatagcatgtttatgagctgatccattggctcatcaattgatgactttgtgtaaaaagacggcacccgtgttgctttcttcgtcgccacatcgatgcttcttttctcccgctcttgagcttgacgactactctcggccggtgatatctccacaattttcgctccatcgtcgtcttgctgaaacagtgaaataaggcaaatgaaaacaagacaacgaaatgaggtgagagagagatgacaaagagtcctgacctttggtaactctggaggtattgtttgcccaaataagtttatttcaagggtaggacggttgggatgggtacgtattgcatcccgcagagccacctgtgctctccccacagactccacctcctcaccaagggctgtgatttgaacgatggcttgctgaagccaatgtaggtttcccaagccaaagtcaaaatcaaaatcttggtttgaatccgttaggagttgcacactgaaatggaaatcgaggacttcaagcctgggcatagctccatgtacaaatttcagcggtttagttatactgcagcatttcaaattcttgaatccaccacagccacaagtcatgacatcttcacgttcagtattcacaatcaacaagtggagggagtgaagcactggaaaccccccaaggatttccagatcccgttcttccgcctcagataccatcagccataagtggtagaggttaggaagatgtccaggattaatccaaagaggcagccttgagaactccaaccagcgcaattccatggaacgaatatgtctagagagggcatagccttcaggttccaactgaacacctctatttaactgtactccatagtaatcaaaatgtatagcctcgatctctggcagattcgatagggactctagcaaatctctcagctgccattcatcttgtgcttttatcaaaaaacggagcacccttagttgtctcagctttcccagctcattaacaaacctgctcgcagaatcctcatcgtcatgcccaccaggataaatcaccaagtgctgcagggacgtgaggttaccaatccaattgggcactctcgttctccagtcagcaattagacacatcaattctgtaagattatgcaaggcttgaggtaattcttccacaccagttccatcgaggtccaatgtttgcagaaacttgaggttccctattccttccggcagcttaccgataaacgtgtttcttagcccaaggaacttgaggtgatgcaatttcccaagatgaacaagatcatggccttcaatacctgcacaattttcgaaatccagtacacgcaataatttatagctttcaattggaggtatcgcgtatataggacatccaatggcattaagtgacctcaattgtgccagccgtggatgttccacaagtctgtactgctcttttgttatgttctggaatgctaaccgccgagaacgaacatctagaagaccaaacttttcattgactgcagaaacaaattcttcttcgtgtgacatgtagaggatcaaatcatgaaacatattatgaacacgacaagcatatacaagacccgtgccttcaagtgttactggctgcaccatgcttcttcttatgagctcgtggaaacaagattcgccaaggttaaagagcccatcatgtgctagttctccattgaaaaaaccttcagctatccacctccatattaaccgatgcatcccaatctcacaatcttcagggaaaatactcagatataacaaacatgtctttaatcgtgctggtagatcataatagctaagcagcagtatgttcctcaaattctccatttcagtactgttttttagtattctggaaccaatagaatcagcaacattgtaccattcttttatgtttcttgacttactagccagcaagctagatgtagtaataatagccaatggcacgcctccgcatttattcaatattttctcagacgcatcagaaagttcaggaggacatttaccttcagagccaaatattcgtccatagaataatatatttgatttctctcgagtaagaggtttcatcatatagcaaccacctacatactcagcaacatcaattctgcgagtagttgcgattattctgcttcctagcttattctcaggaaaagcccattgtatcattgcccatgcgtcagtatcccatatgtcatcgacagcaataaggtacctatatttattgtattaattggagaagtaatgtaagcatagctaaagatatgaattgcaataatatatataagcatattactctataatatggatatttccgtggaatgaacatataatgcacactaggtgtggtacatgtacgcgtgtacctcttattatgaaggaattcatgcactagattcataagttccaatggggtgctgatgtcaataagttccttgtactcagtctcgtcaagctcataaagcaattccttgaagaatttttcgagctgaggaaaccgagacaccgacacaaaggccgcgcaatggaattcccctttagctttaagtttgtcataaactgcttttgcaagcgctgtcttgccaagtcctccaaaaccaacgatagagactcgcctttgttcagtggaggtgtcatcttccttggtcaaccttgtgattagttcctcccttgcctcatccatgccgacaaggtccgtggccttggtgtacttcagagcaaatatgcgaggatcaaccaaggttttgacacggggaaccatagcatcaacatcgtacctgttagaaccagaaaaggaaataaaatggaagaaagacagtaaaggtgaaagttcatatgcacgcaagccaaagtggaaattaagtgtttcaatgacctttgacgacgctcatctatctgctggacgcgctcttcgaagtccttgatggtctgggcgatctcatggcgattcacgaccatatatgtcttattcatgaatattttggcgcttcttttgctggtgcgttcagggccttggacacgcaccaggaaggtgtcgacgaagtcctccatgtcgtaggatagctccctgacgctgcgtgccaacattctgaccagatcaggacgtggcttcagtggcacaggcacttcgacaacatggccgaggacagaatgaacccgctcgagcttgttcatgacgcgctggatgtcccccctgacgcccttctccaggttgtactcaccatgaagcagcatggagagcttgagaagaagggtgcctagcgctccagttgcgaactccatggctagctagctcccaaggttgcagacgcatgagatctagcgcaacagactaaggcacgtttggtttagcttttttctattcagtttttttgaaaatctgattatgaggagaatctgtctgtagtgagaagctgagtatcaatacgattacgtgtgaacgaagataaagttgttcatatgactcaggatctagaaagtgacggattcctattattacaacgactcaaccggttatgtgtttatgttgattttggatgatttttgcctcaacgaattttatagaaactggctgaaaagctaagcgtttgacagtttgcagcagcttttaatgaccagaagctgccagaagccaaaacaaacacggcctaaaagggatacaatgttttgttggaattcgaatcagctgcttacctagctgtgctcgcttatttgacacgaacttggtggccggaggatatagagattagatcaaacagagttggacggtggcaagatttcagaagtagatttcatcttcatccacagaagaatcaactaaggaatctctctctctctcgctcgcttgggcatggagagcttgggaagaagggtgcctagcgctccagttgcgaactccatggctagctagctcccaaggttgcagacgcataagatctagcacaagagactaaaagggatgagatgttttgttggaattcgaatcagctacttacctagctgtgctcgcttatttgacacgaacttggtggccggaggatatagaaattagatcaaacagagttggacggttggcaagatttcagaagtagatttcatcttcatccacagaagaatcaacttaggaatctctctctctcgcttgggcatatcgaggaaagtgcggctactggcaagtggcaaccaagtactaatctattgatagcatggccagctgtatctgcagccctcagcgtttccctaaatttttcgcgttatatattactacgtagcacagcaaaattcactccactatattcaatctttctgtaactattccgtctatatattcctttatatatcctctacgcataaaatatatatatatcaatccaactatcattaactaccatattttttcaatttttattttcttaacgtataaatccattgaataattgaattaatttttcaattagacatataatctctataagttattgtgggacacataatacgtataattacctattatttaatttctaaattttaaaaaactcataattaaatatattgtgtcgtacatatttctggtgaatatttattaaattcgtattcatcatataccattaccaacaacgaagtaattatttttcgttttgtaattaccatcgatgttattggaccatacccatgctcatagttgatctgcattatcgttcgaagcttttccttcgcaagcacatacgcaacaaccgtacactgcaagcctcccttccaatgcattatgaatctgttggcacccaatatttcagcacgattgaaatatgacatgaatattcgaccaaattccattgcaagcacccatgcgacaaccatacacagcaagacacatgaggctttcagtgcaagacacgagcttgcaacacaagctaactccatctcgtctatacatatgggtacgtgctcttcccatttgtgtgcacatctcactcctcaactcaagctaacaagactttgtacgttgtgtcgtctttgcgtagggacgatgattccgattcgagtgatagtgacgacaacacacttatgcttgccactcttcttaccctcaccattaaggctacacaccgtaggtgtagacgttccggtatcccccgccgcgtgattcacagggatcattatgctggagagaatctcatccaccatcactacttcggctaaatctcgtgtatccaccccacgtgtttcgcagaaggtaacaactacatacttgtattattaagttttgcattaacagtgtctttcatactttacctattacattttataggttccgcatgagtagttcattgttcctccgcattatggaaggactgcaacagcaggatagttactttactcaacgggtcgacgctactggcctagctggactcgaaccacttcaaaaagtatgtgcagcaatgcggatccttgcttacatcttacctactgatgtcgtagacgagtacattcaaataggggagtctaccgttagggaatgccttattcatttctatcgtgcattaattgcatattttagtgggtggtatctacgaactcctaatgaagcagacattgcacgcatcatgcacaatagcgagtcgagggggtttccaggaatgttgggttccatagattgcatgcattgggagtggaggaactgtccaaccgcgtggcgaggatagttctgtggtcgaaatttaagacctaccatgatactcgaggctgtcgcaacgtacgatctctagatttggcatacttttttttggcatgcctagaacaaacaatgacgtgaacgtgctacattgatcgccggtatttgaccctatgacaagcggtcgaatgccacccattcattacataatcaacgatcatgcatacaactttggttattacctagctaatggcatatatctgaactggccaacttttgtgaaagccattagacacccttatgaggaaaaaaagatatatttcagacaaatgtaggaaagttacaggaaggatattgagtgcccatttggagttcttcaagcacgctgggtggtgctacgtgatcctgcgtacggttgggattgcaactgtcttactgagataataactgcatgcataataatgcataacatgattgtcgaagacgaaggcgactttgcagcaaataccaatttcggagagagtagttctgcatttgaaccgtgccaactcattgaaggacgctcggattgggtgattaatcacttcaatcttcgtcgctaggaaaggtcttgcacactacaaaatggtcttgtcgagcatttgtgagcaagacgtggaagtatgtgagtgtcggagaggaaatctctagccgggtggcggaacgcacccgccctaaatcctaagatgaggagggggcctaagcgttttgcctgtctgctagatggtcgatgaaagcacgagagcacacaagagtttagagtggttcaggccaccggagcgtaaaacccttctccactatgtagtattgctgatactcgagagcttggagaacttctcgagggtctaagtaagtctgagtgacttgagagcttgccttgtaacgttgtgtgccttcccttttatagctcaagggaggcacatacaagggtgctgagccccaacatgtgggcccaggaacataatgaatggaatacctagagcaactaatgcaggtgacgtctgtgcaatctccaggcccatgttgtccgcagtacgcgcagtgttgacatgcagtggcagcttccttggtaacatacgagtaatgatgggcgtagtgcacgcggcggtatgggcatgcagtctgccaatggaacggacatgcatgccgcctgtgggatggacaggtcgctgcctgccagcggaatggacaggtctcattaaatgcggaggtagcacatcgcctgctagtggaatggacaggcacgccgcctgcggaatggacaggtctcattaaatgctgaggcggcacatcgcctgtcagcgggatggtcaggcggcacgccttatccgcaataaatgcaggggtcacgtaacccggaggccttacgtcaggctctgccagttggcttacgtcacgcgcagtaggccacgtggcagcatcgggtccccgcctgggcgcggagcagaagtgtatgcggacaggtccgcaccagactgggtctggacatgtgtcgacaccggacccccgcctgagtcctattcaaggcccgggtatgttctatcctgggaccttgggacccccctatgggcggcccggaccccatacggggggggggtccggatcccattccagggatccggcttgcacacgtggaggtccgagaccaaccatgggggtccggactgtatatccgggggtccggcgctctcccgtgggggtccggaccactgttgacgccatggagtatatcaccttctctggacacgtggcggcttcggacccacccatgtggtggagtctggcgctgctgtggacctagaatagtcgcctgagattggggcgagccgtggtttggttccacacacatcacttctaccacgcgactaagggacagccgcgtgggttcttcgtctttgtacagtagcagggggtaccctagtttcatggtaccgacagtgtccctcgggcccaccttaggggaggatgcgagcctgcaggtggggccaaaacttgtacttcacgtcaacatggcatgaccggtgactggggctccacctcagcgcgcgtcgcattaactcagcgcatctggtgacgcacgcgctgtcagtccgtgctcggtcacgtcaactgccacatctatccccgcggctgactgacctatgaccccacgtctggtggttccatcgggccacgcgtggggcgccttgttgccgccgccttggttaataaatagccgtcttccactgcctcgagtccaatctctctctattagctggccagaggtgtccaacaccttcagtaccgttctttggacgagagaagccttatccttcatactttctggacgtgttggtttccaatctgacattttatcagaaggttctgccaatttatccctactgtagttttgtgtcgcttgctcttgtttgctgctgactatctctccgcagcagccccgaggcggtgcgcggtcgtgcgcggcggttcgcttcccgcgtgacggtttgcttcttccgcactcggagaccagcacaccatctgcatgacttgtgggcccgggcccccatgtcagagactgggccgcatgggcgctaggtgcgcgtcggacgggatttcctggggcacaagcgagagagtcttccttgaaaagggattcaccccgcgtgcagcagttacgctttcgcattctttccaactgctgcgccctttcgcctccgagccctctgcgcccctttgcattcgtgctcttctgctttccgctgtcgtagtctccatggcctcgctggttcatcccgagcatttccagtccgagggggcactcaacctggtgcgcaacctgctcggatggagcgcgtcggcgttcgctggaaggatccgcgccggcgccactcccctcggcgatctcgccaccggggagttcgtgctcttcgtctcctacctctcctgcaggttggcgctactgatctcgcctttcttcctgctgctgctggaggagctcggccttcagcttcaacacctcacgccccactccatcctctaagcggccatcttcacccacctgtgcgagatgttcgtgggggtggcgccctgtacctccctcttccgccatttcttcgtgctggtgatgtccgggaaggccaaggaccatctcggcgcctactacttgatagtcgcctagagggggggtgaatagggcgaaactgaaatttacaaatataaacacaactacaagctgggttagcgttagaaataaaaactagtccgcgagagagggtgcaaaacaaatctcaagtaaataaggagtgtgacacaaggatttgttttaccgaggttcggttcttgcaaacctactccccgttgaggtggtcacaaagaccgggtctctttcaaccctttccctctctcaaacggtccttccgaccgagtgagcttctcttctcaaatcaaaaccgggaacaaaacttccccgcaagggccaccacacaattggtgcctcttgccttgattacaatggagctttgatcacaagaacaagtgagaaagaaaagaagcaatccaagcgcaagagctcaaaagaacacgacaaatctctcttgctaatcactaaagccttgtgtggaattggagaggatttgatctctttggtgtgtctagaattgaatgcctagctcttgtaagtggttgagaagtggaaaacttggatgcaatgaatggtgggtggttgggggtatttatagccccaaccaccatactagccgtttggtggggctgactgtcgtatggtgcaccggacagtccggtgtacaccgaacatgtccggtgcgccagccatgtcaccaaagccgttgggattcgaccgttggagctctgtcttctgggcccgcctggatgtccggtggcgcaccggacatgtactgtagagtgtccggtgtgccagcatgggcgtgcctgatttctgcgcgcgctggcgcgcaataaatgtgctgcaggtagccgttggcgccgaaatagctgttgccccgcagttacaccgaacatgtccggtgaattatagcggagcagccgctctggtttcccgaagcaggcgagttcctaaggctgcccttccttggagcaccggacactgtccggtgtacaccggacagtccggtgaattatagcggagtgcctctggaaattcccgaaggtgacgagtttgagttggagtcctctggtgcaccggacactgtccggtgtacaccggatagtccggtgccccagaccagaggtgccttcggttgtccctttgctcctttgttgaatccaatacttgatctttttattggctaagtgtgaaccttttacacctgtataacttatacactagagcaaactagttagtccaattatttgtgttgggcaattcaatcaccaaaattaattaggaaaataggtgtaagcctaattccctttcaatctccccctttttggtgattgatgccaacacaaaccaaagcaagtatagaaatgcataattgaactagtttgcataatgtaagtgtaaaggttgcttggaattgagccaatataaattcttacaagatatgcatggattgtttctttgtttttaacattttggaccacacttgcaccacatgttttgtttttgcaaactcttttgtaaatccttttcaaagttcttttgcaaatagtcaaaggtaaatgaataagattttgcaaagcattttcaagatttgaaattttctccccctgtttcaaatgcttttcctttgactaaacaaaactccccctaaatgaggtcctcctcttagtgttcaagagggttttgatataccattttgaaatactactttatcccccttttgaacacaataagataccaatttgaaaatactcttttgaaaaactaaatttttgaaattggtggtggtgcggtccttttgctttgggctcatactttctccccctttggcatgaatcgccaaaaaacggaatcattagagccctttaattactctctccctttggtcataaataaatgagtgaagaatataccaaagattgagtccttttgctttggactcaagttctccccccccaaagatggagagatgcgcggagcgacggcgaaggatgagttacggagtggaagcctttgtcttcgccgaagactccaattccctttcaatacacctatgacttggtttgaaatagacttgaaaaacacattagtcatagcatatgaaagagacatgatcaaaggtatacaaatgagctatgtgtgcaaatcaacaaaagaagttcctagaatcaagaatatttagctcatgcctaagtttgttaaaagtttgttcatcaagtggcttggtaaagatatcggctaattgatctttagtattaatgtaagaaatctcgatatctcccttttgttggtgatcccttaaaaagtgataccgaatggctatgtgtttagtgcggctatgctcgacgggattatccgccatcttgattgcactctcattatcacatagcaaagggactttggttaatttgtaaccgtagtcccgcagggtttgcctcatccaaagcaattgcgcgcaacaatggcctgcggcaatgtactcggcttcggcggtggaaagagcgaccgaattttgcttctttgaagcccaagacaccaaggatcttcccaagaacccggcaagtccccgatgtgctcttcctattgattttacaccccgcccaatcggcatccgaataaccaatcaaatcaaaagtggatcccctaggataccaaagcccaaacttaggagtgtaagccaaatatctcaagattcgttttacggtcgtaaggtgagcttccttagggtcggcttggaatcttgcacacatgcatatggaaagcataatatccggtcgagatgcacataaatatagcaaataacctatcatagaccggtataccttttgatccacagacttacctcccgtgtcgaggttgagatgcccattagttcccatgggtgtcttgatgggcttggcatccttcatcccaaacttgtttagaatgtcttgagtatacttcgtttggctaatgaaggtgccctcttggagttgcttcacttgaaatcctaagaagtacttcaactcccccatcatagacatctcgaacttttgtgtcatgatcctactaaattcttcacatgtagactcgttagtagacccaaatataatatcatcaacataaatttggcatacatacaagtcattttcaagagttttagtaaataaagtaggatcggcctttccgactttgaatccattagtgataagaaaatccctaaggcattcataccatgctcttggggcttgcttgagcccataaagcgccttagagagtttataaacatggttagggtgctcactatcttcaaagccgggaggttgctcaacatagacctcttccttgattggtccattgaggaaggcacttttcacgtccatttgataaagcttaaagccatggtaagtagcataggctaataatattcgaattgactcaagcctagctacgggtgcataggtttcaccaaaatccaaaccttcgacttgggagtatcctttggccacaagtcgtgctttgttccttgtcaccacaccatgctcatcttgtttgttgcggaagacccatttggttcctacaacattttggttaagacgtggaactaaatgccatacctcattcctagtgaagttgttgagctcctcttgcatcgccaccacccaatccgaatcttggagtgcttcctctaccctgtgtggctcaatagaggaaacaaaagagtaatgctcacaaaaatgtgcaacacgagatctagtagttacccccttatgaatgtcgccgaggatggtgtcgacggggtgatctcgttggattgcttggtggactcttgggtgtggcggcctttgctcttcatcctccttgtcttggtcatttgcatctcccccttgattattgccgtcatcttgaggtggctcatttgcttgatcttctatttcatcaacttgagcttcatcctcattttgagttggagatgcttgcgtggaggaggatggttgatattgtgcatttggagtctctttggattccttaggacacacatccccaatggacatgttccttagcgcgatgcatggggcctcttcattacctatctcatcaagatcaacttgctctacttgagagctgttagtctcatcaaacacaacgtcacaagaaacttcaacttgtccagtggacttgttaaagactctatatgcccttgtgtttgaatcatatcctagtaaaaagccttctacagtcttaggagcaaatttagattttctacctcttttaacaagaataaaacatttgctcccaaagactctaaaatatgaaatattgggctttttaccggttaggagttcataagatgtcttcttgaggattcggtgtagatataaccggttgatggcgtagcaggcggtgttgaccgcctcggcccaaaaccgatccgaagtcttgtactcatcaagcatggtccttgccatgtccaatagagttcgattcttcctctccactacaccattttgttgtggcgtgtagggagaggagaactcatgcttgatgccctcctcctcaaggaagccttcgatttgagagttcttgaactctgtcccgttgtcgcttctaattttcttgatccttaagccgaactcgttttgagctcgtctcaagaatccctttaaggtttcttgggtttgagatttttcctgcaaaaagaacacccaagtgaagcgagaataatcatccaatattacaagacaatacttactcccgccgatgcttatgtaagcaatcgggccgaatagatccatgtggagtagctcaagcggcctgtcggtcgtcatgatgttcttatgtggatgatgggctccaacttgctttcctgcctggcatgcgctacaaaccctgtctttctcaaaatgaacattggttagtcctaaaatgtgctctccctttagaagcttatgaagattcttcatcccaacatgtgctagtcggcgatgccagagccaacccatgttagccttagcaattaagcaagtgttgagttcagctctatcaaaatctaccaagtatagctgaccctccaacactcccttaaatgctattgaatcatcacttcttctaaagacagtgacacctacattagtgaaaagacagttgtaacccattttgcataattgagatacagaaagcaaattgtaatctaatgaatctacaagaaaaacattggaaatagaatggtcaggagatatagcaattttacccaatcctttgaccaaaccttggtttccatccccgaatgtgattgctcgttggggatcttggtttttctcgtaggaggagaacattttcttctccccagtcatgtggtttgtgcacccgctgtcgataatccaacttgagcccccggatgcataaacctacaaaacaagtttagttcttgactttaggtacccaaatggttttgggtcctttggcattagacacaagaaatttgggtacccaaacacaagtctttgaccccttgtgcttgcccccaacatatttggcaactactttgccggatttgttagttaaaacataagatgcatcaaaagttttgaatgaaaagttatgttcatttgacgcactaggagtcttcttaggcaacttagcacgggttggttgcctagaactagatgtctcacccttatacataaaagcgtggttagggccagagtgagacttcctagagtgaatcctcctaattttgctctcgggataaccggcagggtacaaaatgtaaccctcgttatcctgaggcatgggagccttgcccttaacaaaattagacaatttcttaggaggggcattaattttgacattgtcttccctttggaagccaatgccatccttgatgccagggcgtctcccactatagagcatacttctagcaaatttaaattttcattttctaagttatgctcggcaattttagcatctagttttgctatatgatcattttgttgtttaattaaagtcatgtgatcatgaatagcattaacatcaatatctctacatccagtgcaaatagaagtgtgctcaatggtagatgtagagggtttgcaagattttaattctacaaccttagcatgcaatatatcattcttagttctaaggtcggaaatagtggcattgcaaacatcaaaatctttagccttagcaattaatttttcattttcatttttaaggctaacaagagataagttcaattcttcaatcttagcaagcaaatcatcattattatttctaagattggaattgaaacattacaagcaatagaatcaaccttagctaataaattagaattctcatttctaaggttatctatagtctcatgacaagtgcttagctcactagacaatttttcacatttttctacttctagagcataagcatttttaaccttaacatgcttcttattttctttaataaggaagtcctcttgggtgtccaagagatcatccttttcatgaatggcactaatcaattcattaagtttctctttttgttgcatgttgaggttggcaaaaagagtgcgcaagttatcttcctcatcactaacattttcatcactagaggattcatatttagtggaggatttagatttaaccttctttcttttgccgtcctttgccatgaggcacttgtggccgacgttgggaaagaggagtcccttggtgacggcgatgttggcggcgtcctcgtcgtcggaggagtcgctagagctttcgtcggagtcccactcccgacaaacatgtgcatcgccgcccttcttcttgtagtatcttttattctcctttcttatccccttcttgtcatcacccctgtcactatcactagaaattggacatttagctataaagtgaccgggcttaccacacttgtagcaaaccttcttggagcggggcttgtaatcctcccccctcctttgcttgaggatttgccgaaagcttttgatgacaagtgccatctcctcgttgtcgagctttgaggcgtcgattggttgtctactcggtgtagactcctccttcttctcctccgtcgccttgaatgcgaccggttgtcccgcggatgtggagggatcatctagctcgttgattttcttcgagcccttgatcatatactcaaagctcacaaaattcccgattacttcctcgagagtcattagtgtatatcttggattaccacgaattaattgaacttgagtagggttaaggaaaataagtgatcttagaataaccttaaccacctcgtggtcatcccatttcttgctcccgaggttgcgcacttgattcaccaaggttttgagccggttgtacatatcttgtggctcctccccttggcgaagacggaagcgaccgagctccccctcaatcgtttcccgcttggtgatcttggtgagttcatcaccctcgtgcgcggtcttgagtaggtcccaaatctccttcgcactctttaacccttgcaccttgttatattcctctctacttagagaggcaaggagtatggttgtggcttgggagttgaagtgctcgatttgggccacctcatcctcatcatagtcttcatcccctacggatggtacctgtgcaccaaactcaacaacatcccatatacttttgtggagtgaggttagatgaaatcgcattaaatcactccacctagcgtaatcttcaccatcaaaagttggtggtttgcctaatgggacggaaagtaaaggtgtatgtttagaaatgcgagggtagcataggggaatcttactatacttcttacgctcttggcgcttagaagtgacggacgtcgcgtcggagccggaggtggatgttgatgaagaatcagtctcgtagtagactactttcctcatcctctttttcttgtccccactccgatgcgcgcttgtgggaagaagatttctccttcttctctttgtgcgagtctttcttctccttcctcttgttgcaggactcttccgatgaagtcttcccgtggcttgtagtgggcttttcgctggtctccatctccttcttggcgtgatctcccgacatcacttcgagcggttaggctctaatgaagcaccgtgctctgataccaattgatagtcgcctagagggggggggggtgaatagggcgaaactgaaatttataaatataaacacaactacaagccgggttagcgttagaaataaaaactagtccgcgagagagggtgcaaaacaaatctcaagtaaataaggagtgtgacacaaggatttgttttaccgaggttcggttctcgcaaacctactccccgttgaggtggtcacaaagaccgggtctctttcaaccctttccctctctcaaacggtccttccgaccgagtgagcttctcttctcaaatcaaaaccgggaacaaaacttccccgcaagggccaccacacaattggtgcctcttgccttgattacaatagagttttcatcacaagaacaagtgagaaagaaaagaagcaatccaagcgcaagagctcaaaagaacacgacaaatctctctcgctaatcactaaagccttgtgtggaattggagaggatttgatctctttggtgtgtctagaattgaatgcctagctcttgtaagtggttgagaagtggaaaacttggatgcaatgaatggtgggtggttgggggtatttatagccccaaccaccaaactagccgtttggtggggctgactgtcgtatggtgcaccggatagtccggtgtacaccggacatgtccggtgtacaccggacatgtccggtgcgccagccatgtcaccaaagccgttgggattcgaccgttggagctctgtcttctgggcccgcctggatgttcggtggcgcaccggacatgtactgtagagtgtccggtgcgccagcatgggcatgcctgacttctgcgcgcgctggcgcgcaataaatgcgctgcaggtagccgttggcgccgaaatagccgttgccccgcagttacaccggacagtccggtgtacaccgaacatgtccggtgaattatagcggagcagccgctctggtttcccgaagcaggcgagttcctgaggccgcccttccttggagctccggacactgtccggtgtacaccgacagatcccggtgaattatagcggagtgcctcctggaaattcccgaaggtgacgagtttgagttggagtccctcgggtgcacggacaccgtccggtgtacacggacgatccggtgccctagaccagaggtgccttcggttgtccctttgctcctttgttgaatccaatacttgatctttttattggctaagtgtgaaccttttacacctgtataacttatacactagagcaaactagttagtccaattatttgtgttgggcaattcaaccaccaaaattaattaggaaaataggtgtaagcctaattccctttcactacttccagacgaggccggatttggtcggcgcctacatctcctccctcggaggcgcgaggtgggaaaactggcgcgctgactgggtgatcgtcagcaccaaggccaacgactgcctcgcgctgctgagcgatgggccaaggctcgaccgaaagcaatggagggccaagccgtccctcgtgccagagttcctacccgtgttggacaggatcaagaccttggcagccggcggcctgacctcgatgcacgtggtcggcgatttcctgaagcaccggatcgcgccgctgcagaggagggcgcgcctgtgctactggttcaccggttcgaacgacatcagccggatccagcatgggccgggcaccgacctgtcctgggaggagctataactcttggtgaaaggaattactagtgagtccttcatccctaagtccctaatccttccccagggcatccctgcgctctgcgacgacctagggttgaggacggtgatcctcgcctcgctgccgaccctcgacgagagcgatgtggcggttcgccagaccggcggccaggatccccaccgcgggatccagatccccggtgtaccgactggaggttcccagcccgctggtgcgggctccagagctctccccgtggcccccagccccttggacaagggcaaaggggctgcaagcagctccttcgccccaggtggctcggggggttggaggaagagaggcgacgccggctgcgtcgcaccgacgagttgcttgtcttggatcctcctcttgattcaaaccccccagaagcgtcagaggaccactggcggggccgaggagaccggctcccaggcccagggcgcgcagaggcgcgccagtcctccgccaccaccaccatcggatccgctgccaccgccaccaccactgtcggtcccgctgccaccaccaccgcctgggggtgatctcccccaggggcaccagcagcaacaaccgcagcagcagcaacaacaacaacaacagcagcggacgtctcgcttccagggtcgctggaaggtctagggccccaagtaagtgtagccccttttttccatgggtgttattatcataccgacgggtcttaacccatcctttgcttgccagggcttcctccccctctgctcccaaggtcgtgcctcctccgccggataccatgcccgccggcgggtctagcccccatcagcaggcatcttctgggagcggtgccagcgaactgccgacggctaccgtagcttcaacgatggtgacgccgtcgagcacaccgccggcagcggcggaggaggaggccccagctgtgcccactcctgccgtcgtggggggtgcgtccagctccatcccgccgcccactccggaggagacagaggtgatttttgggcggcggctccagtccagtgccgagccagaggcagcaccggttcccctcccccgggtgctgtctcgtgctcatcaggctctccaagagatcgaggcggcgatccggcgggaatgggaggcgatggaatccgagcaccagcgcctcagcgactggcgtacccatctggaggagcgcaccaaggcggcgtcccaacaattcgcctttgagcggttcgaactggcgcgagaccgcaaagactacaagaaggacctccataaggtgtacgccagggagttagaggtgagcctgaaggagaagaggctggccaagaaggaggagcacttgaactagagggaggaggtcatcacagagctccaggccaagctcaacgccttcaatgaaatcctggaggagcagcgggtccaacagactgtggttgtggagagcctgcaaaggctgcagcaagaacttgatggcaaggcccgcgacgccgccctcgccgaggagaagcttaaagcgaaacgagaatccttagacaggcgggagacggaccttgaccggtgggaggtgggcctcgccaggcgagagaaggatctcaccttcaaggaggaaatggttgaaaggcgggagaagtcgctggccaagcatgagctcgaggcggaggagaaggagcggacgctggaggagtaggtccgtcggttccaggcggtggaggcgatgaagaaaacacttgaagatctctgggcgaagcagcgcgtcggggtccagcgcattgccgcatgggccggcgaggcgagcacgacactggtgccgctaggggtgagccccatcctggtgtcggagctgccgacgtccatctctgacgcgctcctggtgctggacttcaccgccgaccgcctccgacgcctggaccagatccttggcgcccgcctggaggctgagggcggcaggctctgccaggcggtgatcgagtacatcctaacgtgcttccggagccacgacccgaccatctccttagagccggtgatcgctggtccggtggccgacaccgaagacgccgcccggcagggcatacaagatactgtggaggtggtggccgagcacttccagcgggatcctgccgatgatgagtagctagatttgcagaaacagggcaatgtccgctgggtagcgacttgtaatagtttttggctttacaagatacttttgagtattatttatcaagcagcattagcacttatttgtatgctatttgtccttgctgtgtgtgacgttaccaactccaccctggtacttggcccccctgggatgtaggctcgatgtgtcgaggctggatgccagtatacctaagaaagagttggtgatccggcccccaggaggtagtcccgactgggacctggacctgcacacagcttcagctaggaagttttagtagcgcacccataggacccgccagctggtatcttctaccctttgattcatgcaacaggacctacaggacttagcctgggaagccaagccgtatgcccgggcccccttggatcgcagctccaaatactaggacacccattgcagagtggtggagcgtgtaggcttagggtacaggaccaggctaagcggctacacagctctggaccaccccaggaaacaagtgtccattctttagaaccgaacctcaggttaccggacccacaggactatagttccaaatactagggtacccatcatagagtggtggagcatgtaggcttagggtacggaaccaagctaagcggctacatggctccaggccaccctaggagacaagtacccgttctccagaactggcccctaggctgccggacccccctgccgaggggtcccgaactgcaagcctggctactcaattcagatgtcattatataagcaagggtgggaactgtatgggtgggttagataaaaaatgatgctcgtaaattgaagcagaataagaccatcataggaacaaatctgggggtgaatcttttctttataacttgatatacatgagtgtaggccaacagaccgggcttatgagggtgtacctcaccgggctggcgtacatatatgcgcaacctagttacaaaggaagaaaactgaacccccaggtttgtttttataggaaaaacttacggagatgctctatgttccagggattggtcagaggctctccttcagttgtagcaaggcggacacacctgggtcggcatatttccgtcaccttgaagggtccttcccagctgggggagagtttgtggagcccctctcggttcagtattcgccttaggaccaggtccccgaccctgagctccctatgcacaaactgttggtggtagcgcctgagcgcctggttgtaccgtgcatttcggatcactgcttgccatctgcgctcgttgatgaagtccatgtcttcacgccatagctgctcctgcatagactcatcgaaagcttggacccgtggggagcccataatgatttccgggggaaggcaggcttcggctccgtagaccaagaagaacggggtctccccggtagctcggctgggtgtggtccggttcccccatagcacgaacggaagctcactgacccaatttgcaccgtgctttttcatgcagtcataggtgcgtgtcttgagccccctgaggatctctgcgtttgccctctccacttggccgttgctcctgggatgagccacaaatgcgaagcagagctaggtaccgatgccctcgcaatactcctggaaaagacgacttgtaaactgggtcccattgtctgtaatgatacggcttgggaccccaaatctacagacaattgacttgaggaaagcaacagcagcaccctgggtgatgttgaccataggggtggcctctggccacttggtgaacttgtcgatggcgacgaagaggtaccggtacccgccgacggccctaggaaatggtcccaggatatccacccccatatgtcgaatggccaggagggtggaatcatctacagagcttgagctagtgtgtgtatctgctttgcatggaattgacacgccttgtaggactttaccatctcaactgcatcctggagggcggttggccagtaaaagccatgccggaaggccttaccgaccaatgtgcgggatgaggaatgacttccgcactcacctccatggatctccgtgagcaactcacgaccctcctcctgggtaatgcactgcataagaatgtcgttggcgccatgacggtagagatctccttccaccatcgcgtagcatttagccaaccgcactatgcgctctgcgagcacatgatcttcaggaaggatattttctttcaggtagtcccggatcttggagatccatgcatccagaccactctgagatactggctgtggcactaaggggtaggcaagaccccctatagcacacacagtctttggtgggtgttgtagatgtaacgccactgggaccgctagctttgaggtgctagtctcgcccccttcgcccagtttggcaggctgggcggtgggtctcagcaaccatctttcgaagacgcccttgggcacgggtgcccaagttgatgccctcatggagagttcttctgccgccgagttatcagcccaaggaacatattgctgttccagggccgtgaagtctttttccagcttacttatgtggaggaggtaagccgcgagcctgggctcattgcagctacattccccgcggacttgcttgatgatcagctgggattcccccttcacgaggagctggcggatccccagggatagggtcgtagacaagccaaagatcaatgcttcgtactctgccatattgttggtagccttgaactcaaggtgcaccatgtacttcacttgatctctgcttgggtcgacgaggaccactccggccccgcgcaacttgctgacgggcggatccgtcgaagaagagcgtccagtggggctcgatgaagactggacccctgggctccgcaagtgtggggtccgaatcgggatccggacccccaggagtgcttggtggaggtgtccactccacgatgaagtcagctaggacctggctcttgacggcatggcgaggctggaagtctagctagaactcagcgagctccacatcccacttggtgatgttgcctgtggcgttagagttgtggaggatggcccttaacggggaggaggtcaccaccacaaccctatgtgcctggaaatagtggcgcagcttcctggacgcaacaagtacatcatagaggagcttgtgcgtctcaaggtacctggtctttgcctcatggaggacctcgctgacgtagtagaccggcctctgaacggtccggacccctatagctggtcccaagccctcaggttcttggccttcttgcgccgtcctttccacaaccagcaccatgctcaccacttctgcgaccgccgcgatgtataaatacaatggctccctagggtctggagctaccagtactggtagggacaccaggtgctgcttcaactcttgaaagcttgctcagcctcttcggtccaagagaatggaccggacttccgcaggagcttgaagaagggtagcgccctctcagccagccgtgagatgaagcggctaagggcggctaatgaccccgtaagcttctgaatgtccttgatacgggccggaggcctcattgccttgattgccctaatcttctctaggtttgcttcaataccccgatgtgagaccaggaatcccagcaagcttcccagcggagacaccaaagacacatttgtctaggtttagcttcgtgcgcgtcgcccgcagcttgtcaaagaccagggtcaggtcttctactagagtcgaccccctcctagtcttgaccatgatgtcatcgacatatatctcaaccatgtccctaatcaggtccccgaaggtcttactcatcgcccgtacaaatgtcggcaaggcattcttcagaccgtagggcattacaacatagcagtagagcccatccactgttacaaaagcggtatgcttcatatcttccctagacatctggatttgatggaaaccatagtaggcatctagaaaggacaagaggtcgcacccggaggtagagtccacgatttgatctatgcgtggaagtggataggggtccttgggacaagccttgttcaggctggtgtagtcgatgcacatccgaagcttctcgttcgcctttggaacgatgactgggttggccagccacacagggtgatggacctcttcgataaagccagcgtcaagcagctttcggacctcctggcgaatgaagtcctgccgctcaacggactgtctccgaggcttctgactcaccagcttggcgtcggggtggatctttagatggttctcaatcacctcactggggatccaggcatctgtgacggttcccaagcgaaaacgtcgacatttgcctagaggaaggcgacgagcgcgagttcctatttctctcccatattgcccgcgatgcgggtggtctgggaggagtccgcgccgacctggacggtcttcacgggttcgccgtctgctccggacggctgcacctttggcaccttggcagacgccttggtaccggaggtcgagggggtccttccctccatcgtctgggcgagcagcttccgccgccagggcgtgcagcttctcgatagccgtcactacagcagtgtggtcccccccgcacggtaaggaccccagctggggacgacatcttgaggaccaaatacccataatgggcaatggccatgaaccggtacagggccggcctaccaatgatgacattgaaggggaggttaacctccacgacgtcgaactggacgttctcggtgcagaagttatcctctgtcccgaatgtaaccaggagcgtgatgctccctaggggatacaccggctgtgggcccactccggagaatggacgagagggtcccagtcgggaccctgggatctgcagctgcttgaatgcagcatggctgatgacgttgaggcctgccctgccatcaatcagcacatggtgcagccgcatgttggcgatgataggggccgtgatgagcggtagtataccggcccctgccatgttgtcagggcagtcggatgccccgaaggagatggtggtgctgctccaccgttggtgtggagcagccttcgggacccctggggtcgccgacaggacctcgcagtgcagggacttgacgttcctacgggaggtgagctcccagctcccgccgtacatgacgtacagcttcttgcggcggtcgctctcgccatcagagtcggagtccccggtgaagacgtcctttaggaccccctcgggtgactgatacccgaggtcccgttccccggcggccacgtcactgtcatcgaccctctccttgccaggctggcgatgtggtggggagccgtttaagcgccctagatcctctgggactcaaatgtgatacaattactagtcctaggaggctagtaaacacatttatacatcagatagttccagatctgtttaaatgagacaaacctataaaggtggcgatcaactttaagagttggtccacaactcggtacataacatcagagtggggctgaagcagccagatatacgcagtgaagcaaatcagcagtccaacagccacaggcaaggttgggaacagtcgtaactcttacccgatctccttttctgaaaaacaacaaataagcaagggtgagtacaaacgtactcagccagcccaccttcacccacggaatggggaaatcagatataatgcatggaatatgtggagctcaggatattttgcagaaatagcaatatttgatgcagtgttattttgtaaaacattttgtatttttcaaagcgcatcctctcccaaaggagctggaagtttttcaatatagaacaaaatcccttggactaaaccatccaagtatctcagcagtttcgcactggttttctttttcaaaaacagctactggacttcccgtccaccatagctcacggctcaaccgctggaccttttaaaaaccacttttctcaaacgcaccttttttttgaaaacaaaacactaattgccataccacaccagactcgtccattcctgtagacacaaactattcgaataggtttgaactctgcgtagaggggtacactttacccactagtccggtttctgcgatctcactgttgtgagatccgaatgacgaatctctttctttcctcacacgtccttaccttaacggttataccggatggagtcaggccatcgccatgtccaaaccgaacaaaacattccccctccttatcctcacggtgctcctcagccttcataaccctagggtttggaccgtgcgagttcagattgagtgactgctcatacagtctcgagtggttgtacttgttatgagtacaggcagtgaaggatgacaaaccggtccttatatgagggtacaatccttctgctcacacctaaacccgctgagccatcaccttaggccctcccctaaaccagggagtccctgatcatccctactcaaaggtgataagggtgaaaacccttcatcatacacattttgaaaagcattttcttttgaaaactcacaccttttctcaaatcatttgtaacaaatatatcaaggattgattgcggcaagcggctgggtggccataataacttgtctcaaaatcatatcatgcataaaataacaggctgagggttgtggttgaaaaatcataggtaatttatgcatgaaagggatccagtgagcttgtcgtgcttatccggcaaaggggggagagcttgcggaagtggcttctggctccaccgcctggcgtagacttgcagaatctggcctccacgagacggcacaaacgctccaataactatgtaacatgaacaagcaaacatacaaaccaacaagtataccaacaaatatttagtatagtggtcagaatagagatatatgaatgggtagtcttgagcagaatctgtgtcatgtggtgttgggatactactagtggcggagcggaggtgcttaccaggagggtggactggaggcgaagcgacactatgcgtgtagccgacagagcggagtaactgagtgggtggggtgtttgccttggctgagggtgttgagtgtgtttggagagggagagggtagctgggtgtatttatagctgggtgtatgtggtgtagcacagtgaagttcactgttggtgagaatagtgatgaatgaatcgtctgacttagtatgaacaggagagttataggcagaatatggggcaaaaatattttgggagtttttctggaacatgaaccatgcttaagggatgacatggttggatagggaatagtttgataggaatttagaaacaagaattataggaatatgagtttggaagcctagttcgaaggaatctcaaagttaagcatgctcaacttggagaaacctgggatgggtgaccagatgggaagttccctactggaaggaaaatcacagtcaccggagttcgtatgactggaatatgggtctagccggtcttaggtggactagacagcatgatggatgagtagttgaaatttggggagatagaatgatcgatgaataataacgatgaatagtaacgacgaaaagatatcatagatatcatcgatgaatagtaacgatgatgaatagtaacaataacgaatagtgtcggtgaatagtaacgatgctgaatagtaacactaatgaatatccggtgaatagtaatggtgaatagtgatggtgaatagtcgtatgaactaacgatgaacgatgaatagtgacgatgaacgaacgatgaacgatgaataggaactatgaacgaacggacgaacgatcgaatgatcggacgaacgaacgatcggaatttcggcagcataacgacatgacaaagattatctggaagaacgataaatagagactatgaacgaacgatgaatatgcttacgcagcaccttcgtcgtgcgtctgcgtctcgccgtcatccgtcgatcccatgttgttcgtcgccgttcgcctgtggtaaggcccctcgtccgaaccatatgcaaaactccatcacggtcgcatgattcgtgccgcgcgcagcacgcctgtttgcgcatgattcacgggttgtcgcacgtgtcgtcatgcgtcgttcgtgtgctagtcgtgcgcatcgtcgttcgtgtaaatcgctgtttgcacgctttaataaaatcattttgctataccgttcacgttaaataattgattgtttgtttagttgtgtattattaaaaataacaattcaatcgaacctaattaataattttaattatgcgtttgtagatacccgttagtgtgtgtacgccaacttaaatgtcgtgtttaacgagtagttagtatgaatacgacataatttatcagtacccgtttatcgcgttgtttataagttcattataggtttaaatatattgagtcttatgcgtcgtaactcgttcggtcacgtcaattctagcggcgttaatttcatattaggaacattggttggtcgcgacacatgtttatttaattaataaattaattatttacctgttagttattaaaataactaatttattattttaacttacgctttataaatatatgataatgtgattaataactacacaaatgttttaaatttaatacttgtttaatatagaggcgacatctatgtagtagttctcgtttgcacgtcagcgtgctattcgcgcgcgcagtcatgttgactcgtgcgtgtcgcgcgttgttgtgcgcattgtttcgcgtacgcgcaccgtgtcgtcggggtcccgacgacatccgtctaccccctagacgacgttcgtctacccttagacaactcccgtctatcccctgtctacctcgtctatccccctgcgctaattaatttcctatttaattgctggtcagtaaactgaatactcaatcggattaaaattatgattttagttaggcgattgtaagtatgtggtaatgtgattttaacaacttagatatggtatttaatacctatttagtgtttagtataaacatgatgtctgttagcgactctcgtgagtcgtgcacgtcgtcgcactgttgtcggcgtctcgagaccggggggtccctggaccgacgagtaaactgtcgccgcgtgccccagcccagatgggtcggcgcgagacggagcgcgaaggggggaaaggcagccggagggagacgtgcgtgagaggtggaaatcccgcggccttcgtgtttgtcccgcgcccaggtcgggtgcgcttgcagtagggggttacaagcattccacgcgggagggagcgagcggcctcacgcgagtgcccgtcccgtcctttccccgcgcggccaaccctccgtaagagggccctggtccttccttttataggcgcaaggagaggatctaggtgtatagtgaggggtgtagcagtgtgctaacgtgtctagcggtggagagctagcgccctaactacatgccatcgtggcagtcggagaggttttggcacccggttcgtgtggtgtcgtggccgtcggaggagcgctggagcctggcggaaggacagatgtcggggctgtcgagtccttgctgacgtcctcttgcttccgtaagggggctgagagccaccgtcgtcatagagcatgcggggcgccattattacttgtctggcggagcgagccagatgggacgccggtcttgttccccgtagcctgagtcagcttggggtagggtaatgatggcgcctcctgttgacgtggtcggtccgtgccctgggttgggcgatgtggaggctcctccgaggtcgaggtcgagtctgtctttcgaggccgaggtcgagtccgagcccctgggtcgggcgaggcggagaccgtcggctgaggccagggctgagtccgagccctggggtcgggcgaagcggagttcgtcgtcttccggggctgagcctgagtccgagccctggggtcgggcgaagcggagttcgtcgtcttccggggctgagcccgagtccgagccctgggtcgggcggagcggagttcgtcgtcttcgtgggccgagctcgagtccgagccccgggtcgggcggagcggagttcgtcgtcttccggggctgagcccgagtccgagccctgggtcgggcggagcggagttcgtcgtcttcaggggctgagcccgagtccgagccctgggtcgggcggagcagagtttcccatggcacctagggccggacctggctgctgtcagcctgactctatcgagtggcacagcagtcggagcggcgcaggcggcgctgtcctcttgtcagaccggtcagtggagcggcgaagtgactgcggtcacttcggctctgtcgaccggagagcgcgcgtcaggataaaggtgtcaggccacctttgcattaaatgctcctacgatttggtcgattggcgtggcgatttggcctaggttgcttcttggcgaagactaggcctcgggcgagccgaaggtgtgtccgttgctggaggggggcctcgggcgagacgtagatcctccggggtcggttgccattgcccgaggctgggctcgggtgaggcgtgatcgtgtccctcgaatggaccgatccttgacttagttgcacccatcaggcctttgcagctttgtgctgatgggggttaccagctgagaattaggagccttgagggtacccctaattatggtccccgacagtagcccccgagcctcgaagggagtgttaacactcgcttggaggcttttgtcgcacttttttgcaaggggaccagcctttctcggttgcgttttgttccggttggtgcgcgcgagcgcacccgccgggtgtagcccccgaggcctcggaggagtggtttgactcctccggggtcttaatgccttgcgcaatgcttcggctggtctggttgttccctcatgcgagctggccgtagcccgggtgcacggtcgggtcccaagttctcgggctggtatgttgacgctatcaacggtttggctggagccgggtttgcgagagcagcccccgagcctctgcacagggcgagaggacggtcaaggacagactcgacttttttacatacgcccctgcgtcgcctttccgcaaggaggaggggtggaaagcgccatgttgccctcggagggcaccgaacatggtgtctccggtgagtggaagcccgcgccccatttgttaggggtcggctagaggcccggaggcgcgctcaaaagtacctgcgggtgatctgccggacccggtcccctgtcgacggggtccgagggctcgacgcctccctctgatgggatcccgttacaagatcgttcccgctagtctcggaaatgtcctagggtacctcgggagcgtagcctgagccttggttatgtatcgaacgtacccagggtcatccctcgctctatgtctgaggcgattgtgaacccttcgagggccagcctacgaacccgtgatcagtagttggcgcggagcccgagtggcctgaggcggctgttgaacccttccgaggggccggccttcgaacctttgaccagtagtgggtgtggagcccacgcgcttgaggcggctgttaaacccctccgaggggccagcctttgaacctctgatcagtagggaggctcggggcctgtttccttcacggagaaggatccttttcggggtatccccctttcccggtccctgttgtaagagagagaaagaggaaaaggaaaaggatacgaaatcgaatgacgtggcataccttttttgacgcggtcattatggcgaaggcgaagcgtcgctcgcttcccctgccagaggcgccgcctgtcccgccgcggagttaatgcgacggggcgagtggttcgcgaggcggccgttgcgcgtgcgcgagccgttcgaggaatggaacacgggcgcgccttcttcacgccgtgagagaggtttctctcgctgtccctggatgggacgtgagcttggctgacgacgtgaccgctgctcctgcccgcctgccaccgccattactgccggcccttttttggctgtattgaccgtcgcgcctggctggcactgctgggtcgtacgcagggttgcctcgagtcgcggtgcgggttccttgatcgaggaggcgtggtagtggtgcgagtggcggtgcagttgctcgcacgtagcaaccggcgcgctggttgcatgacgcgtgggcctgggcctccgtgctgggtgcgttggaagtcggagtggcgcgcccacttggcgcggttgtatgccgcctgcatggctgcccgccctttcacccgctggtctgggcgaaagtggaggaatgcttgtaaccgctgggcggttgcatgcaccgcgcgcggcggtttggcttcttccgcccgggccggttgcatgacgcgtgggacccagcccccgcgccattgggggaggaccttggagcgtgttggagaagactcagcccacgacggctggggacgcaagtagggagagtcgcctttaaaaggagggtggcccccttgaaaggcgaccatgtcttcgcgctcccttatgcatcgtgtctttccaccttccgagcccccggatgggggacacccgcaatccttccgccttgtcgttggagggacgcaacttcgtggaagttggtacctttcagccatcgttcggcttcaaggattttcatcacgcggcccggctgcaccccctcgccggtggtcacctaagacggtgaccactagcccctggatggggagaagcaagccgggctgcgtcccccacctctccctcagcttcaaggatgcttaccatccttgctggggcggagagcgaggcgagccggggctctacctcccgcacgggttggctggccacctcctcttccagcttttggtggtggaaaccatcccccagctctgcggaggaggcgtcctcaagccatgccggggaaggcgaattgttgctgtccagctaggatgcaacattccgccctcttcctcgttttcgtggcgaggacgggagcgaggacctgccggtgcgctatggagcgacccgctctttggctttgatgtctggttcgcgtcccttgagaggggacgcgaacgagagccttccggtggtcgcgtccgtcctgggaccatagctgctgctgcaggaggtcactggcgagtcgcccggaacttgtcgccccgcaggctccccggtgtggaggttgttcatgcctgtggggacggaaccggagttccgtttgtaatggcaccttgaatgccggtattttgctcattgtggctgtcagggcctgaacatgtatgtatttttggcgcggagccgtgtttttcctcatttccgagcactaagactcgcctgttggttatctgaaccgcttcaccaagcgtgagtcgccccgtgcaaaggtgacgtgtgaggtatccgtatcccggaggcgtaggagtccctcggctcggtcggccttgctgtccggggcttctcttgcttagttaaaggaacccctcggccgctcttcgatgagccgaagccaggggtagcggtgtcagcacggacaaaggcagagttggctcgaaaagaagacttggtcggccagagcctggccgggtcgtccactggcaggactatcgccggaattgagttgccgaggcctcgggccgggctgatgtcttcgaggaacagctggccgaggcctcggggtgaccggccgagccgtctgctcgagtcggattcctagagaagaccctggcggcgatggcctgggcgtggtgatgatgtcgtccttcagagtggagatcctcggaccgcgtcgccgtccgaggctaggtcggacctcgccgaaggtgtagttgacgccgagggtgctgctgctcccttcaactttcaagatccgagcctacaggatcggattatcttgtagcgtgcattttctacggtcgccgagtcccaaacacaccatcgtcatgttgtaaagccgcgcttcttttcctcttgtttcgagtatctggactttttcgtcggtaacagaattgtctgtgcgagcaagagttccttttcacggaaggtgatgagtgaggtatccgtatcccggaggcataggaatccctcggctcggtcggccttgccgcttacgcgcactcttgcccgtccatagggttctgtcaccgacgcagtcgagaaggcccgaagaatcgcttcggcagaaaagctttcgagcgtgaagtcttgttcggtccgcggaatcacttatccgaacgcgagttacttatcgcagaaggtgatgagtgaggtatccgtatcccggaggcataggagtccctcggctcggtcagctttggctgcttacgtgtactccgtcgttttcaggatccactttcgaagaagtcgaaaagcacgaaagacattctggcagaaaggatcttttttcgagggaaatttcgacgtagagggggttccccccttttagcccccgagggagggtcgggctttaccgaggcaaggctgacccttccttgatgactaaactttgcgtgggaacgaggtatacgaacaacttgaaagcatcttaagggtagatgcgacgtagctgttggatgttccaagcgttgctgtagacctcgccttgactgttggccagcttgtacgttccgggcttcagaactttggcgatgacgaacgacccttcccagggaggcgtgagcttgtgccgccctcgggcgtcttgtcgcagccgaagcgccaggtcgcccacctggaggtctcgggaccggacccctcgggcgtggtagcgtcgcagggactgctggtaccacgccgagtgtagtaaggccatgtcccgagcctcttccagctggtccagcgagtcttctcgattagcttggttgctttggtcggcgtaggtcctcgtcctcggggaaccgtgttctaagtctgtgggcaagatggcctcggccccatagactagaaagaacggtgtgaagcccgtggctcggctcggcgtcgtcctcagactccagaccaccgaggggagttccttcatccatctcttgccgaacttgttgaggtcgttgtagatctgaggcttgagtccttgtagaatcatgtcattggcacgctctacttgcccattcgtcatggggtgagccacggcggcccagaccacccggatgtggtgatcctcgcaaaagtccaggaactttctgccggtgaactgggtgccgttgtcggtgatgatggagttcgggaccccaaagcgatggatgatgttggtgaagaacgccaccgcccgttcggacgatgcttgtttaggggtcggacctcgatccacttggagaatttgtcgatggcgaccaacagtgcgtgtagccccgggtgccttcacgcaaggggccgacgaggtccggaccccacacaagcaaaaggccaggtgatgggtatcgtctgcagggcctgagcgagcaggtgggtctgccttgcgtagaactgacacccttcgcaggtgcggacaattctagtggcgtcggccaccgccgtcggccagtagaaaccttgtcgaaaggcgtttccaacaagggctcgaggtgctgcgtgatggccgcaagcccccgagtgtatatcttgtaggagctcctggccttcggcgatggaaatgcatcgctggaggatgcctgaggggctgcggtggtagagttccttcccgtcccccagcaagacaaacgacttggagcgccgcaccaaccgccgagctttggcttggtcgaggggtagctctccttggtggagatattgcaggtacggggtctgccagtttcgattaggcgtgaccccgcttcgctcctcctcgatgcgcagtgcctcaccctcgagggccgagggtacctcgggccgaaccgagggtgcctcgggttgggccgagggtgcctcggactgagccgagggcgcctctggctcggccgaggccttctcaggctcgggcgtgtcgtcggtcttgacggagggttgatgcaggtctcgggagaagacgtctggggaaccgttgttcgccccgaggctatcttagccagctcgtccgcagtctcgttgtagcatcgggcgatgtggttgagctcgagcccatagaacttgtcttccaggcgccgaacctcatcgcagtaggcttccatcttcgggtcgcggcagtgggagttcttcttgacttggtcgatgacgagttgcgagtcaccgcgaacgtcgaggcatcggacccctagctcgatggcgatgcgcaacccgttgaccagagcctcgtactcagccacattgttggatgccgggaagtggaggcgtagcacgtagcgtaggtgcttcccgaggggcgagatgaagagcaggcctgcgcctgctcctgtcttcataagcgacccgtcgaagaacatggtccagagttccggttggatcggaactgttgggagctgggtgtcgacccattcagccacgaagtccgccaagacctgggacttgatggccttccgaggggcgaacaagatcgtttcgcccactttgcaattctacccgaggcctctcagcactggatgatctctcccaggggaaaggatgacaccacagttaccggatgagactcgaagtagtgtcgcaacttctgccgcatcaggatcaccgcgcatagtagcttctgaatttgtgggtagcgggtcttggtctcggacagtacctcgctgatgaagtagactggcctctggacgggcaatgcatgcccctcttctcgtctttcaatcacgatcgcggcgctaactacctgagtggtcgcggcgatgtagatcaagagggcttctccggcagcggggggcaccaagatgggcgcgtttgtaaggagcgccttcaggttcccgagggcttcctcggcctcaggggtccaagtgaagcactcggccttccttaggaggcgatacagaggcaggcctctttcgccgaggcgcgagatgaagcggctcagagccgcaaggcatcccgtgactctctgtacgcctttcaagtccttgatgggccccatgctggtgatggccgcgatcttctccgggttggcctcgatgccccgctcggagacgatgaaccccaagagcatgcctcggggaaccccgaagacgcacttctcgggattgagcttcatgcctttcgccttgagacatcggaatgtcacttcaaggtcggaaaggaggtcggaggctttcctcgtcttgactacgatgtcatcgacgtaggcctcgaccgtccggccaatgtgttcgccgaacacatggttcatgcaccgttggtacgtcgcactcgcattcctcaagccgaacgacatggtgacatagcagtacatgccgaagggtgtgatgaaagaagtcgcgagctggtcagactctttcatcctgatttggtgatgccctgagtaggcatcgaggaaagacagggtttcgcacccagcagtggagtccacaatttggtcgatgcgaggcagagggtagggaaccttcggacatgctttgtttggaccggtgtagtctacacacatccgccatttccctcctttctttctcacaagcacagggttggcaagccattcgtgatggaatacctctttgatgaaccctgccgccattagcttgtggatctcctcgcctatggctttgcgcttttcttcgtcaaatcagcgtagaggctgcttcacgggtcaggctccaactcggatatccagcgagtgctcggcgacatccctcggtatgccgggcatgtccgagggactccacacgaaaacgtcggcgttcgcgcggagaaagtcgacgagcactgcttcctatttaggatcgagctcggagccgatccggatctgcttggaggcgtcactgctggggtcgagggggacagatttaaccgtctccgctggctcaaagttgtcggcgtgacacttcacgtctggcacctccttagagaggctctccaggtcggcgatgagggcctcggattcggcgagggcctcggcgtactccacacactccacgtcgcattcaaacgcgtgtcggtacgtggggccgacggtgatgaccccgttggggcccggcatcttgagcttgaggtaggtgtagttggggacggccatgaacttcgcgtagcatggcctccccagtactgcgtggtaggttcctcggaacccgaccacctcgaaagtgagggtctcccttcggaagttggagggcgtcccaaagcagacgggaagattgagttgtccgaggggctggacgcgcttcccggggatgatctcgtggaaaggcgcagcgcctgcccggaccgaggacagatcaacacgcaggagcccgagggtctcggcgtagatgatgttgaggctgctgcctccgtccatgaggaccttggtgagcctgacgtcgccgatgacggggtcgacaacgagcgggtatttccccgggctcggcacgcggtcggggtggtcgacttggtcgaaggtgatgggcttgtcggaccagtctaggtagactggtgccgccacctttaccgaacagacgtcccgacgctcttgcttgcggtgccgagccgaggcgttcgccgcttatccaccgtagatcatgaagcagtcgcggacctcggggaactctcctgcctggtgatcttccttcttatcatcatcgcgagccctgccacccttcgcgggtggcccggccctgtggaagtggcaccgaagcatagcgcactcctcaagggtgtgcttgacgggcccctgatgataggggcacgactccttgagcatcttgtcgaagaggttggcacctccggggggtttccgagggttcttgtactcggcggcggcgacaaggtccgcatcggcggcgtcgcgtttcggttgcgacttcttcttgcccttcttcttggcgccgcgctaagttgacgtctggggggcatcttccggtgggtggccctggggctgcttgtccttccggaagatagcctcgaccgcctcctggccagaggcgaacttggtggcgatgtccatcagctcgctcgccctggtgggggtctttcgacccagcttgctcaccaggtcgcggcaggtggtgccggcgaggaacacgccgatgacatctgaatcggtgatgttgggcagctcggtgcgctgcttcgagaattgtcggatgtagtcccggagagactctcccggctgttgtcggcagctccggagatcccaggagttcccagggcgcacgtacgtgccctggaaattgctggcgaaggcttggaccaggtcgtcccagttggagatctgccccggaggcaggtgctccaaccaggcgtgagcggtgtcggagaggaacaggggaggttgcggatgatgaggttgtcatcgtccgttccacccagttggcaggccagccggtagtccacgagccacagttccggtctcgtctcccccgagtactttgtgatagtagtcggggttcggaactgggtcgggaacgacgcccgttgtatggcgcggctgaaagcctgcggaccgggtggttcgggcgagggactccgatcttccccgctgtcgtagcgtcccccacgcctggggtggtagcctcggcgcaccctctcgtcgaggtgggcccgacggttgcggtgatggtgctcgttgccgaggcgacccgaggccgcggcgccgtgttgcgcgtgcgccggtgtggaccgaggcttcccgcatgaatcgggaagtcgcggcgcgatgttccgaggggtacccctgccttcgggaggcggagctttcggcccgtcggaccacggcgccctccaggagattcttgagctctccctgaattcgccacccctcggtggttgatggctccggcatcgcgcggagaagcattgccgctgcagccaggttctggccgactccactggaagtgggtggcggcctcatcctgacatcgtcagcgatgcggtgctggataccctggggtagatgacgcacttctccggccggatgttggtccgcccattcctgcccgacgtcccggcggatcggctcaagtgttcctgctccctcgtcgagcctggcctgcaccccgcggatttgctcgagctgtgggtcatgaccccccgccggaacggggaccacaactagctctcgtaggatgtcaacgcgaggcacaagcctagggagatcaccgttctccggcataccaagatggttgccttcggagggaccccctagatcgacgtggaaagattcacgacttgggccgcagtcctcgtcgccgaggctgcgactaccgtcagaacagtcggaaaggcagtagtcgcatgcggtcatgaagtcccgcatggcactggggttaccaagtccggagaaatcccaacagaagtcgggctcgtcatcttcctcgaaccctgagggcccgtaggtcgagacgtccgtcatccggtcccagggtgaccgcatacgataccccagagggtttggactcgcctctacgagagcatccgccaaagcgaagtcgcttggcgggtcgaggctgaatccaaaaggcgtgagatgggaatcagtgggtacctcttggtcgacgggtggtgacgaaatcacgtcagggactgactgcaccatcgtctcaggtacgagggtgacgcccagcaagccttccgcgagcgtgctggcatcgtccgtttgcttgggatgaccgtgttgcggggagacgacgctcgtcttcgtctcagacgcgaggtcgatgcccgacgtgccccccgttggggcgtcggcgccatcgactcgctcgacagccgacgaggtgctgcctcctgcttggccttggttgccccgcctcctcctccgtcggcgggggaggggacggggtgagctcggatgttgttcttccaccacgtggggaagacgtcgtcgattccgccgccagcgggcgggctgtcggccgccattgtcgctgtcgcacggcgggggaaggagtatcatgtcgtagctaccgttgagggacatgaactcaagactcccgaaacggagcaccgtcctgggctggaaaggttgctagaggctgcccatctggagcttgacgggaagctgttcgtcaacacgcagcaggcccctacctggcgcgccaactatcggcgtctcgagaccggggggtccttggaccgacgagtaaactgtcgccgcgtgccccagcccagatgggtcggcgcgagacggagcgcgaagggggggaaaggcagccggagggagacgggcgtgagaggtggaaatcccgcggccttcgtgtttgtcccgcgcccaggtcgggtgcgcttgcagtagggggttacaagcgttccacgcgggagggagcgagcggcctcacgcgagcgcctgtcccgtcctttccccgcgcgtccaaccctccgtaagagggccctggtccttccttttataggcgcaaggagaggatccaggtgtacagtgaggggtgtagcagtgtgctaacgtgtctagcggaggagacctagcgccctaagtacatgccatcgtggcagctggagaggttttggcacccggttcgtgtggtgtcgtggccgtcggaggagcgctggagcctggcggaaggacagctatcggggctgtcgagtccttgctgacgtcctcttgcttccgtaagggggctgagagccgccgtcgtcatagagcgtgcggggcgccatcattacttgtctggcggagcgagccagatgggacgccggttttgttccccgtagcctgagttagcttggggtagggtaatgatggtgcctcctgttgacgtggtcggtccgtgccctgggttgggcgatgtggaggctcctccgaggttgaggtcgagtctgtcttccgaggccgaggtcgagtctgagcccctgggtcgggcgaggcggagaacgtcgggcgaggccgtggccgagtccgagcaccggggtcgggcggcgaagttcgtcgtcttccgggccgagctcgagtccgagcccggggtcgggcggcggagttcgtcgtcttccgggccgagcccgagtccgagcccgggtcgggcggcggagcggagttcgtcgtcttcgggggccgagcccgagtccgagccccgggtcgggcggaggagcggagttcgtcgtcttcaggggctgagtccgagtccgagccctgggtcgggcggagcggagttcgtcgtcttccggggctgagcccgagtccgagccctgggtcgggcggagcggagttcgtcgtcttcaggggctgagcccgagtctgagccctgggtcgggcggagcggagtttcccatggcgcctagggccggacctggctgttgtcagcctcactcgtccgagtggcacttgatcggagcggcgcggcggcgcgcgtcatcttgtcgagccggtcgccggagcggcgaagtgactgcggtcacttcggctctgtcgaccggagagcgcgcgtcaggataaacgtgtcatgccacctttgcaataaatgctcctgcgatttggttggttggcgtggcgatttggcctaggttgcttcttggcgaagactgggcctcgggcgagccgaaggtgtgtccgttgctggaggggggcctcgggcgagacatagatcctccggggtcggttgcccttgcccgaggctgggctcgagcgaggcgtgatcgtatccctcgaatggaccgatccttgacttagtcgcacccatcaggcctttgcagctttgtgctgatgggggttaccagctgagaattaggagccttgagggtacccctaattatggtccccgacaactgtctacgcgctgtttgcacgtgtggcgctcgtcatcatcgtgttgttcgtgtgttattctcgtgttgtccgtgtcgttcgcgcgtgtcacgcgtgcggttcgcacgcgttgtcacacgtcgtttgtgtgcgtcgcgtgtgccatttactcaggtcgctcgccttgccgcacatcgttcgcacgtatctcccgtgtcgatgacgtgggtcgcacgacgtcttctagtgataataaattgtttttgcttataatcactcatgttaataacaataacttaccaggtcacacattctaattaatttatttaatggttgctcgactaatgtttattagattagtattccaattaaagcaaatatatagttgtcaacttgcgtttttataaataaatattaacatggttaatattgacttaaatactttttagttatttgatacttgtatagtttaaacacgacatctaattagtttttctccgcctgtcgcgtgggctgttccgcacgcggtggcatgctgtttcacatgtcgttcgcgtgctgcttgtacgttgtcgtcgttcgtttgctcgttcgagccacacgtatggttcgtgtgttgtcgcgtgctgttcacgcgcgtcgtcactcgtcagtcgcacatggtcacgcgttgtcgtgcgcgctgtctgtgtgctccttcgcgcgtgccgttcctcacgtggtgacgtgctggttcgcgcgtcgttcgtgttgtttgcgcacactgttttgggtgtcgccagcttgctatgccgcgcgtgtccgcgcgtcggttgcatgttgtcgtgccatttcgggcatcgtaaactcgtctctcttagaacctctcgtgctaattttattacttatttatttgacagttgtttgtgtggcagattaatcaaaactaaatagcagctataatttatgtttgataacgtcgaattaaatattatagatatactggtttagagttaacgcgataacttctcgaccgtagcctcgaccgtcgcgtttctttttcctcgcgtgaccgtagtaacgcgctctatttcgttttgcatgttttattatgtttgtaattatatggtgtaatgttcttatacatatatgtgtttccttgcttgtgtctgttcgtcttcgcttcgtgttgcgattagagtgtgatccacctccaagctttaaggaatcgacgatcaagctttgacgaccaagtgatcaaattctctgagttctattagactgaagatcctgagtatctgtttagtgaaggcaagtgtcctctgacccatcatgtcctatctacttataattcactgtctcgcattacttaattcaaacctaaggattgactagctttctatttacttatccttgtttaccttttcggttatcatggttagctttatgctattgctttactttaatcaatgaacatgatgtgaatattatgatacgatgatgttatctcgatgatgttcttgtgatactttaggggactcaggctgtttcctgagtacctctctgtaaggacctgtttggggagtgacaacccgggataacagtgcaaccatgagggtggaatgggatgcccttagccgattaattagaggaactagaggagtagttggcttcgccgtagggccatcaatggggtccgggcatagtacttgctctgccgaggctggttgcagatgttcttgatttggttttgttagtcacccttcctttggggagaggtactgtgtttatcaaactggagaaacctaacgggcagctatgacctctaggaaatttttgtaaaggctatgtagtgagaccctgctaggtcaccttggtagtgatcaatggagagtcatgatctctgggcagaacgggaatcatgacttgtcggtaaagtgtgcgacctctgcagagggttagaaactgatatatcagtcatgctcacggttaagagcggcgttgggatcctctttgattagagatacagctggttcgagactcaatggttctattaatgtttttggttcgatgatgatcatgatgttcctcaaggaggaagtggttcacggattggctattactaaaacttggcttccactaataataaatacctgaccaactaaaagcaactacttgagcttaaccccacataaagctagtccacttcagccaaactggacatttgctgagtacgttgatgtgtactcacccttgctttcacaaaacaccaggttgcctttggtgcaatctatgctcaggtaaagaagaagacgtcgaggcagatctccaggagttctaggacttcgacgagttcgtggtttaggctagcgacctcccccagtcagctgcctgtggtgggtttgtttgcgttggctacgtttctattctgtgtactttgattcatattatgtaaatgactctagtctttaatattattactcattctttattgttatccgatgtattgtgctatgatgagtcatttatgtaatcgatgtgtacgtgaatttctgatcctggcatgtacatggtccgcattcggtttgccttccaaaaccggatgtgatatagacccaaatatgatatcatcaacagaaatttggcatataaacaagtcttttgcaacaatttactaaagagtgtaggatcgactttaccgactttgaaatcattagtgataagaaagtctcgcaggcattcataccatgctcttggggcttgcttgagcccataaagcgcctttgagagcttataaacatggttagggtactcactatcttcaaagccgggaggttgctcaacatagacctcttccttaattggtccattgaggaaggcacttttaacatccatttgatagagcttaaagccatggtaagtagcataggcaagtaatatacgaattgactcaagcctagctacgggtgcataagtttcacccaagtccaaaccttcgacttgtgaataacctttggcaacaagtcgggctttgttccttatcaccacaccatgctcatcttgcttgttgcagaatacccacttggtaccaacaacattttgattatgacatggaactaaatgccatacctcattcctcgtgaagttgttgagctcctcttgcatagccagcacccaatccgagtctcttagtgcatcctctaccttgtatggctcaatagaggagacaaaagagtaatgttcacaaaaatgagcaacttgagatctagtggttacccccttgtgaatgtcaccaaggatggagttgacaggttgatctcgttgaattgcttggtggactattgggtgtgtcggtctttcaccctaaaattcttgctcatcttccttatcttgatcatcttcatctcccccttgatcattgtcctcctcttgagatggctcatcttcttgatcttcaacttcattttgttgagcttgatcctcttcttgagttggtggagatgcttgattagaagatgacggttgatcttgtgcttgtgtaggctcttcggattccttaggacacacatccccaatggacatgttccttagcacgacgcacatagcctcttcatcatctagctcatcaagatcaacttgctccacttgggagccattagtctcatcaaacacaatgtcacaagaaacctcaactaatccagtggatttgttgaagactctatatgcccttgtgtttgagtcataaccaagtaaaaagccttctacaactttaagagcaaatttagtttttctacctcttttaataagaataaaacatttgctcccaaagaccctaaaataagaaaaattgggcttttttactggtaaggagttcgtatgatgtcttcttgaggattcagtgtagatataactggttgatggagtagcaagcagtgttgattgcttccgcccaaaactggtcctgtgtcttgtatttatcaagcatggtccttgccatgtcaagtagagttctattcttcctctccactacaccattttgtagaggtgtgtagggagaagaaaactcatgcttgatgccctcgtcctcaagaaaaccttcaatttgagaattcttgaacttcgtcccattatcgcttcttatctttttgatcctaaatccgaactcattttgagcccgtctcaagaatccttttaaggtctcttgggtttgtgatttttcctgcaaaaagaacacccaagtgaagagagaataatcatccacaattacaaggcaatacttactcccgccgatgcttatgtaagcaatcgggccgaataaatccatgtggagtagctcaagcggcctgtcggtcatcatgatgttcttgtgttgatgatgggcggcaacttgctttcctgcttgacatgcgctataaaccctgtctttctcaaaatgaacatttgttagtcctaaaatgtgctctccctttagaagtttgtgaagattcttcatcccaacatgggctagtcggcgatcttagagccaacccatattagtcttagcaattaagcaagtgtcaagttcagctttgttaaaatcaactaagtatagctgaccctctaacactcccttaaatgctactgaatcatcactccttctaaagacaataacagctatatcagtaaaatacagttgtagcccattttgcataattgagatacagaaagcaaattgtaatctaaagaatctacaagaaaaacatttgaagtggaatggtcaggggatatagcaattttacccaaacctttgaccaatccttgatttccatccccgaatgtgatagctcgttggggatcttcgtttttctcgtaggaggagaacattcttttctccccagtcatgtggtttgtgcatccactatcaattatccaacttgagcccctggatgcataaacctgcaaaacaatttaggccttgttcttaggtacccaaacagtcttgggtcctttgacgttagaaacaagcaccttgggtacccaaacacaagtctttgaacccttgtgtttgcccccaacatatttggcaactactttgcctgattcgttagtaagcacatatgaagcttcaaaagtcttaaatgaaatgttaggctcatttgatgcagcaggagttttatttttaggcattttaacatgagtagaatgcctagagctagaagcctcatttttatacataaaagcatggtgagaaacattatgaggttttctagcataaatcctcctaattttgtgctcaggataattaacaggatatagaatatagccctcattatcctgaaccatgggagccttgcccttgacaaaattagacaatcttttaggggcattaagcttgacattgcttccctattggaaaccaatgtcatccttaatgacagggtgtctcccattatagagcatgcttctagcaaatttaaacttctcattttcaattttatgctcattaattttagcagttaatttagctatgtgatcattttgttgtttaatcatggcaaggtgatcatccatagcttctatattaacatctctacatctagtacaaatagaaacatgatcaacagtagatgtagagggtttgcaaacatttaattttttctatcttagcatgtaatatggcattctcatttctaagacaggaaatagaatcattgcaaacatttaaatctttaaccttagaaactaggctagcattttcatctctaaggctagaaattgtatcattcaattcatcaatcttagcatttaatctagcattttcatttctaagaccgataattgaatcatggcaaatgctaagctccttagtcaagttttcacatttttctactttttgagcataatcatttttcactttaacatgtttattgttttctttaataaggaagtcctcttagctttccaagagatcatccctctcattaatggtctcaattagttcatttaatttttttcttttgttccatgttaaggttggcaaaaagagacattaaatcatcttcactatcactagaactaacctcatcactagatgtagtatacttgggggtggttctagattgtaccttcttctttttgccgtccttagccatgaaacacttgtggccgacgttggggaagaggaggcccttgttgacggcgatgttggtggcgtcctcgtcggagcaggagtcggtggagctctcgtcggagtcccattcccgacatacgtgggcatcgcctcccttgttcttgtagtacctcttcttttctttcttcttccccttcttgtcgtcgcccctgtcactatcacttgaatttggacatttagcaataaaatgaccgggcttaccacacttgtagcacaccctcttggagcggggtttgtagtccttcctcctgctttgcttgaggatttggcagaagctcttgatgatgagtgtcatcttctcattgtcgagcttggaggcatcgattagaagcctacttgagtagactccttctgctcttcttccgtcaccttgaatgtgacgggttgcacctcgggtgtggaggtgcacattaaatgcaaccgatacaaatacctgctccaccaatggcaccatagtcaacagaggatgatgggaccatggtcccatctactttcaccatctacgatgacgcacgcctgcgaataccatgcgctgctccctgctccggtcactgttctcaacaactccagatgggacatgcgacatctagccatagcctcagccttaggagaaaactcctcctcgcccgaaggcggccttggtgtcacacccgggttttaggggcccgggcgcgaacataaacaccaggtgtgctgggaccaagtctcacacatatgatgaatagtgatacagaaatgaatgtcacaactttattatacaataggagttctgtacaaaataaataaataaataattacatcataaagagacaatgatccagcaacccaaagttgactgggagacgatgacctagacctctcacgaacacatcgaagcatcctccatgcgcctcattctgtggtacctgttcttgatctgtgggggcatgagacagcaagggtgagctcacatacgttcatagctcaacaagttgtggggaataatgtgcatgaactcgccaaaggtgggagttcatgtgatgtgtaatgctgatcaacaataggagttaaagctgagcattgcttttaaagttggtcaaaaattttattagcaattactagatgtaagtaaataccaaaccataataataatagaacaaaattaataataaatcccatgtaatgcaaatgacaaattgaatttagtttcatgaattaatcatgcgagagtcctgagctgctcatgaccgtgaactcggctagtataccagttttacaatctgcagaggttgtaccctttatccacaagtcgtgtatcccatgtcgccaaggttagctatacccttagacactaccgaggtgaatgtctagggatccactacgaggcctttacaaagttccactagctttcgaaaacccgctacaatttatgggaagagcacttgcaagaatccctcgtctgaccgccatcgcagcaaaatcaacccgagaacctccctgcatgcaactcccctactgcccttgcccctttcgggtaaggtagtcttccactagctttcctaattagtcagccaagaggtctcattcctcccttgtggtggcacatgtttctcaagttaagctccatgttccaattaaaattaatgatcttgacatgaacataaataaaataacagaataattggaacatggatatattgaaatattaatccgaaaccatgtaaagcaatagcatgactacccaaatgattcacgggtaaataaggtaaaagataatctgacaagggtgacctattgggtcccctcaaaattaaacctatgcattaataagtgatattaaagaatattattaggtaaagagtgatcaagggcacaactttcctgggaatctcaggtaccaggatgatcttcaggtgactcgtgacctcgcgctagtcgtagcaatacaaacaaacatggtacagacaaaattaacatcacaccaaacataagaatatattgcataatagtaacctacgcgttgctacgagatcgaggttacgattaaggagttataatttatagaaaatctatgtgattaaaattttaaactatattataacttggttagtgtaaatcatattagagattatattataaataattaactcaattttgatctaagtcattactttgattataaatcatcttttagtccaaagataaccataagatcagaattaatattaatattaggacaagctaacccagaaaacatagattagtcaaattagttacctaattatgaaagtgtgggatatcataaaatcaatgttgctactacatagtaaatatttacacaaagctaacgcaactcgaacgggtcaatccgaagttaaaatggggacgttacgaatttcgaaggttttatatatctgatacaagattacttaagagattaattttttatacaattttcttgccaaaacagtggcactatatgatgaacaataatattacaaaattataggaactggaatggatcaatttggagttcatatgaattttctctgaattatataagttttacaattatttttatactcaaaatcaatttctaaatctatttttcttgttttctttaattcctggactgggcacataaaatccagagagtacaggggcctcggtgtaggaatcccaagacacagactttggacggcgggtttatatgagctcagggtttcttttgtaacatgcacagcgaaggggtattgtgtgatctgagtcgtccgatcaagatctaaccgcctggattagatcccaagcctcacaaactggtattcttcaggagcccttggatcttaatccaacggtccatagtctatctgtgggttggatcacagggcctgatctatccatcggcccccagatcgacggttctgattcactgaaaccacacgtcgcccccaattataatcccaatcgcccagctaggatccaacggttacaaacgtttccttttttctaaccattcgtggccgcacacccaggaattgacggtcgatgcatcgtcttctccatggcgctattcgccgccgcgcgtcctagggagacacagccccaccagcggccaaaggcgccctcaaacgcgtgctgacgtgcgcccccgtcactgcgtctatcctaagtcaaacaatggtggtgccacgccccgctacgtcgagcagtacgccgaacctacttaggtctaggtgagccatgccatgaagaaaggtagggcaagaacgtgtgggggggggttccttaccgaaaggtcctcctgccgcaaccccactaccgatgaccactcgaacaccgccttcgcgattccacccaccgtcgagtgcagtcacagaagaatcccgacggtagcggtgactagtccgagctccactccgtcgggttcaagtcggcgatttctctgacaccgtggagttgagaggggctctatgcggtttggttagagggcacaagaaagggcattatccatcatataataggagcccggggagtcgtcatgcacctccggcatgcacggccgaggttacggagatcgttgagaggtgggcggatgcagcgctcggggaagagataaacagtggccaagggcccccacggcagagagcgcatccaagaaccgcggaacccgcatgttagtgatgggagcgtcagcgctgagtggctagccaatggggactcgcagaccagcgagatgataggggaagcgcacgagagcggctgcccggtggggtccaacggtcggcgcacggctgacaaggcgggcccgcctatcggcgccgccgcgcgcgcggtcgtgaggcgcgaagatgggtcgcgctgaggaagactagatgggccgggtttagggattaggcctgcacgcggttttctcttttatttctctttttcttttctgttttgttttactctttttatttcaaacctaaaatttgaattcaaatcttgtggcgaatctgtactcaaattttgaatgtatggtttgaacatattgttatggaataaattcatttttttacaaatttattttgtattatatggtcttttctctcttcctttttttcaaattcaaatttaggttttaatccaaatgtggacactaatgtatttctattaataatattattattttcttatacacattttgggccttacaaatcctaccccttaaacagaaatctcgtcgtcgagatttgtaagaaaagggatgtatactcatattgtctcaacacatatgcacaaacaaaaatctcatcatgacgcatgatttagtagcaacacatgggtcaattagaccttattattcctcctaaaatagtatcataccaaccactaactaaagtaacatttaactaaaatagtaatatatatatatatatatatttatgtagcttggtggagctgttggtggtggtggaggtagtgggcgttgttgttgttgtctttccaaccgtgcttgtcttatttcttgacgtatctccagccggtcctgacgtatttcttggcattcttgtcttatctgattttgcatttcggtaactatgtttgccatttgttgtattgccatcatttgggcggcaaccacttgatcgattccaaccggtggagtatctggaggattcattctgtttgctgttgcctgataatcttcccttcctggtattgaccatgagagttagaagcatatggtaggatagttttgcaatggaaagtatttagtaagcagaatgaataggctagtagctggttatgatctgaagattctttagcagggcttaatctttgttttatgtctagattggggtaattagtcgtataagatgaatatccagaggtaggagagaatttgtcaagatgagatagtctacatgatgtaggtcaaaattttgtttgatgttaggtggggacagataattaatcaattcatcatgacactaaggttgggttaactcttatactcatggttaagttggactacacctggctagaagggtccaagtaccactaatatgtttaagcaggccacattggattagatcacactagattccataatcctatttaagaataccatttagttgagcatatccagctgactttatctttatgaaaattctagtatatatatttttatctcagtggaacttccaattagtatatatttttatacacctaaaattttcatgccattaacaggtgtggtatagaaaccagggtacatcatattttaactattaggtgagtgttgatatagaatgagtgtactatggcataatcgagcttcctttgtgggtctgaattagggaccatcggcgtggtgttagatgccattatctgagttgggataacaattgcggtatatggggtaggtaggttaatcaaagttttacttttcttttgggataaatgggttgggcaacctataacatagactaggtcgtggctcacgaacgagttggtttaaagcaccaatttagttttaaaacccaattatcggaatatggtctaatctatgtcaccagtattgaataacttgtttaattcaccccctttagattgaatcatattagattagatagggtctaaattagattggatataactagattagactagtttaagttagataaatctaccagggtagaataaatagaataaatattattggaatatgttagaatcttttgggatgggatggattatatggtgtaggtaagtcagaatctttgtcggttaaaacagaggggttatgcaactatcgggaggttaaggtagttgcatatggccaggttggactaagactccaatttaggttaaattatatttataagagtaggatccaatcttattttgctagtattatctaacatgtttgcccattgagagcacctagagggggggtgaataggtgatcctgtaaaaacttaaaactcaatcccacaaaacttgattaggcgttagtacaatagagccaagtggctagagaggaattcttgcacaacacgataaccacaagaatatcaacacagagatggcacagtggtttatcccgtggttcggccaagtccaacacttgcctactccacattgtggcgtcccaacggacgagggttgcacttaacccctttcaagcggtctaaagacccacttgaataccacggtgttttgctttcactttactatatcccgcttgcgaggaatctccacaacttggagcctctcgcccttacaaagatgttcacaaagaagcacggaagtaaggatgggatgagcaacgcacacaagacacaaaatcagagcacaaacacgcacacaagccacaacatgagctctcaacacaactcaaagagttctctactcaaatggagctctagatgctatcacaaagaatcgaatgcgcggaattgaagtcttggtgcttaggaatgcttagagaatgtttggtgtactcctccatgcgcctaggggtcccttttatagccccaaggcaactaggagccgttgagagcattccaggaaggcaattcctgctttctgtcgcctggcgcaccggacagtccggtgcaccaccggacactgtccgctgcggatttctttccttctttggcgaagccgaccgttggagattcagagccgttggcgcaccggaccttgtccgtgcacacccgacgtccggtgcccccttctgaccgttggctctgccactcgtcgcgcgcggattacgcggccgaccgttggcccggtcgactgttggctcaccggacagtccggtgatttatagccgtacgccgccgacgaaacccgagagcagccagttcgccgagcccggcgcgcaccggacacttgtccggtgcaccacggacgatccagtgcacccggatcgcgcgagtcttggctgctcagccaagtcttttccaaattggtcttttcctgtttctagcacttagacacaatacattagtctccaaaacaatgtactaagtcttagaaacatacctttactcttgatttgcactttgtccatcaattggcatagattaacacttaagcacttgtgttggcactcaatcaccaaaatacttagaaatggcccaagggcacatttccctttcaatctccccctttttggtgatttatgccaacacaacaaaaaagcaagtaacgaagtgcaacatcaatgcaaatgagaacacaaatttgttttgattctggcatatttggatcattctttgccaccacttggtttgtttttgcaaatcaaacttaatttcctatctctaagtcaaacacacttgttgagacataaagagagttgttccaagagaaattgatcaaagatttcaaaaacttcccctttttcccataatcaaccattctccccacaagaggccaacttttgacaaaagagacaataaaagatttttgacaaaccaaaaactctattctactattttcaaattttcaaaattctcaagtggtagctgatccatttgttgctttggccttattttctccccctttggcatcaagcaccaaaacgggatcaatcttggcccttaaaccccattgcctcaccaaaatcttcaaataagagtacaaaggcaataaggatattgagatgaacttggagtaagttaccctctcatcggagtgcagtggaagtcttgcatggtccaagtccaccttttccctttcaatccacctttgagactaaatcaagcaaactcaagtacacggttagtcccaaagggtcaagttgtagcacatctccccctaaatatgtgcatcactcacacatggacttttgaggtctggggagtgtttgtacaacttgagcaccataaataaacaacaaaatgcatgaggaacatgattaaaggcatgaacacatgtatgctataaatcaatccaggttccatgaatctaagacatttagctcactacgcagcttgcaaaaggtcgactcatctagaggcttggtaaagatatcggctagctggttctcggtgctaacataaaacacttcgatatctcccttttgctggtggcctctcaaaaagtgatgccggatgtcaatgtgctttgtgcggctgtgctcaacggggttgtccgccatgcggatagcactctcattatcacataggagtgggactttgctcagattgtagccaatgtcccggagggtttgcctcatccaaagtagttgcgcgcaacactgtcctgcggcaacgtactcggcctcagcggtggatagggcaacggaagtttgtttcttagaactccacgacaccaagggccttcctaagaattggcacgtccccgatgtactcttcctatcgaccttacatccagcataatcggagtctgaatatccaattaagtcaaaggtagacccctttggatactagatcccgaagcaaggcgtagcgactaaatatctaagaattcgcttcacgaccactaagtgacactcccttggatcggattgaaatctagcacacatgcatacactaagcataatatctggtttactagcacataaataaagcaaagaacatatcatggaccggtatgctttttgatcaacgaacttacctcctttgttgaggtcgacgtgtccgtcagttcccatcggagtctttgcgggcttggcgtccttcatcccaaaccgctttagcaagtcttgcgtgtacttcgtttgggagatgaaggtgccgtccttgagttgcttcacttggaacccaaggaaatagcttaacttgcccatcatcaacatctcaaacttttgagtcatcaccctgctaaactcttcacaagacttttggttagtagaaccaaatattatgtcatcgacataaatttggcacacaaaaagatcaccatcacacgtcttagtgaataacgttggatcggctttcccaaccttgaaagcattagcaattaaaaagtctctaaggcattcataccatgctcttggggcttgcttaagtccatagagcgccttagagagcttacacacgtggtcggggtaccgttcatcctcgaagccagggggttgctccacgtacacctcctccttgattggcccgttgaggaaagcgctcttcacatccatttggaacaacctgaaagaatggtgagtagcataggctaacaatatgcgaattgactctagcctacacataggagcaaaagtctcctcaaagtccaaacctgcgacttgggcataaccttttgccacaagtcgtgccttgttccttgtcaccaccccgtgctcgtcttgtttgttgtggaacacccatttggttcccacaacattttgcttgggacgaggcaccagtgtccaaacttcatttctcttgaagttgttgagctcctcctgcatggccaacacccagtctggatctagcaaggcctcttctaccctgaaaggctcaatagaagagacaaaagagtaatgctcacaaaaattgactaatctagagcgagtagttactcccttgctaatatcacccaaaatctggtcgacaggatgatccctttgaatcgtcgctcgaacttgggttggaggtgccagttgcgcttcttcctctatcacatgaacatcttgtgcccccccttgatcacacgcctcttcttgatgaacctgttcatcgtcttgagttgggggatgcaccattgttgaggaagaaggttgatcttgctccttttgttcctgtggtcgtacatcaccaatcaccatggtacgtattgcggccgtcggaacatcttcttcatctacatcatcaagatcaacaactttccctcttggagagccattagtctcatcaaatacaacgtcgctagagacttcaaccaaacccgatgatttgttgaagaccctatacgcctttgtatttgagtcataacctaacaaaaacccttctacagctttgggagcaaacttagaacttctacctttctttgctagaatataacacttgctcccaaatacacgaaagtaagatacattgggtttgttaccggttagaagctcatacgaagttttcttgaggaggcgatgaaggtacactcggtttttggcgtggcaagccgtgttcacggcttccgaccaaaatcgctcgggtgtcttgaattctccaagaattgtcctcgccatgtctatgagcgtcctgttcttcctctctaccacaccgttttgctgtggtgtgtagggagcggagaactcgtgcttgatcccttcctcctcaaggtactcctccacttgaaggttcttgaattcggacccattgtcgctccttattttcttcaccttgagctcaaactcgttttgggctctccttaggaagcgcttgagggtcccttgggtttcagatttatcctgcaaaaagaatacccaagtgaagcgggaaaaatcatcaactataacaagaccatacttacttcctcctatgcttagataggcgacgggtccgaagaggtccatatgaagtaactccaggggtcttgatgttgtcatcatatttttggcatgatgagagcttcccacctgtttacaccgcttgacaagccgcacaaggtctatctttttcgaaagttacattagttagacctatcacgtgttctccctttagaagcttgtgaaggttcttcatccccacatgtgctaaacggcgatgccacagccagcccatgctagtcttagcaattaagcatgcatctagaccggcctcctcttttgcaaaatcaactaaataaagtttgtcgtctagtacacccttaaaagataatgaaccatcacttcttctcaagacagacacatctacatttgtgaataaacagttatatcccatattacaaagttgacttacagacaacaagttatatccaagcgactcaactaagaacacattagaaatagagtgctcggatgaaatagcgatttttcctaaccctttcaccttgccttgattcccgtcaccgaatatgattgagtcttgggagtctttgttcttgacgtaggaagagaacatcttcttctcccccgtcatgtggtttgtgcatccgctgtcgataatccagcttgatcccccggatgcataaacctgcaaggcaaatttaggcttgggtcttaggtacccaactcttgttgggtcctacaaggttagtgacaattgtcttagggacccaaatgcaagttttatctcccttgcatcttgcccctaacttcctagcaattaccttcttatcttttctacaaatagtgaaggaagcattgcaagtatgaaaaattgtagaagattcatagtttactttcctaggaacatgaacaacatttcttctaggcatagcatttttcctacccaaatttctatcatgcataatagaagaactagaagcaatcatggcatgagcatcataacttctataaacattcctagaatgtctcctatcatgatacatgaaagcatggttcttttgagcactactagccataggggccttccctttctccttggcggagatggaagccttatggcttgttaagttcttgactcccctcttgaagccaagaccatccttaattgaggggtgtctaccaatcgtataggcatcccttgcaaattttagtttgtcaaattcactcttgctagtcttaagttgggcattaagactagccacttcatcattcaaactagaaattgaaactcgatgttcactacaagcatcaacattaaaatctttacacctattgcaaattgcaacatgttctacacaagatgttgatttattagctatttctaacttagcattcaaatcatcatttatgctccttaagctagaaatagagtcatggcatgaagacaattcacaagaaagcatttcattccttttaatttctaaagccagggatttttgtgcctctacaaacttatcatgttcttcatacaacagatcatcttgcttttctaataacctattcttatcattcaatgcataaattaattcattaatcttatcaaccttagttctatctaggcccttgaataaacatgaatagtctatttcatcatcgctagattcttcatcacttgaggaagcgtaagtactagtattatgagtgcttaccttcttttcctttgccatgaggcaggtgtgatgctcattggggaagagggccgacttgttgaaggcggtggcggcgagtccttcgttgtcggagtcggacgatgaacaatctgagtcccactcctttccaaggtgtgcctcgcccttagccttcttataagccttcttcttttccctcttgttcccttgttcctggtcactatcattatcgggacaattagcgataaaatgaccaatcttaccacatttgaagcatgagcgcttccccttcgtcttggtcttgttgggatgctccttgcgaccccttagcgccgtcttgaaacgcttaatgatgagggccatctcttcctcattgagtcccgccgcctcaacttgtaccaccttgctaggtagcacttccttgctcctcgttgctttgagagcaacggtttgaggctcgtggattgggccgttcaacgcatcgtcaacgtatcttgcctccttgatcatcatccgcccgcttacaaactttccaagtatctcctcgggcgtcatcttggtgtacctaggattctcacgaatattgttcacaagatgtggatcaaggacaataaaagaccttagcattaggcggacgacgtcgtggtccgtccatcgcgtgcttccatagctccttattttgttgacgagggtcttgagccggttgtacgtttgggttggctcctcgcccctgatcattgcgaatctcccaagttcgccctccaccaactccatcttggtgagcatggtgacatcgttcccctcatgtgagattttgagggtgtcccaaatctgcttggcgttatccaagccgctcaccttatggtattcatccctgcacaatgaagctagaagaacagtagtagcttgtgcatttttgtgaatttgctcattaatgaacatgggactatccgtactataaagtgcattccattttcaactatctcccatatacttggatggagagtgaacaagtggctacgcattttgtgactccaaaatccgtagtcctctccatcaaagtgggggtttaccgaggggaatggaaagcaaatgagcattagaactttgaggaatacgagaataatcaaaggaaaagtttgaattaaccgtcttctttttctcgtagtcgttgtcgtcgtccttttgggaagaggaagattcgtcgctgtcgtagtagactatctccttgatgcaccttgttttcttcttcctcccgtcttttcttttgtggcccgagcctgagtcagtaggcttgtcatcctttggatcattgacgaaggactccttctccttatcattgaccaccatccccttgccctcaggatccatctcttcgggcgattagtccctttcttgaagagagtggctctgataccaattgagagcacctagaggggggtgaataggtgatcctgtaaaaacttaaaactcaatcccacaaaacttgattaggcgttagtacaatagagccaagtggctagagaggaattcttgcacaacacgataaccacaagaatatcaacacagagatggcatagtggtttatcctgtggttcggccaagtccaacacttgcctactccacgttgtggcgtcccaatggacgagggttgcactcaacccctttcaagcggtccaaagacccacttgaatatcacggtgttttgctttcactttactatatcccgcttgcgaggaatctccacaacttggagcctctcgcccttacaaagatgttcacaaagaagcacggaagtaaggatgggatgagcaacgcacacaagacacaaaatcagagcacaaacacgcacacaagccacaacacgagctctcaacacaactcaaagagttctctactcaaatggagctctagttgctatcacaaagaatcgaatgcgcggaattgaagtcttggtgcttaggaatgcttagagaatgcttggtgtactcctccatgcgcctaggggtcccttttatagccccaaggcagctaggagccgttgagagcattccaggaaggcaattcctgccttcgtcgcccggcgcactcgacagtccggtgcaccaccggacactgtccggtgcggatttctttccttctttggcgaagccgaccgttggagattcagagtcgttggcgcaccggacactgtccagtgcacaccggacagtccggtgcccccttctgactgttggctctgccatgcgtcgcgcacggattacgcggccgaccaatggcccggtcgactgttggctcaccggacagtccggtgcaccaccggacagtccagtgatttatagccgtacgccgccgatgaaacccgagagcaaccagttcgccagtgccagcctggcgcaccggacactttctggtgcaccgccggacagtccggtgcacccagactgcgcagagtcttggctgctcagtcaagtcttttccaaattggtcatttcctttttctagcacttagacacaatacattagtctccaaaacaatgtactaagtcttagaaacatacctttactcttgatttgcactttgtccatcaattggcatagattaacacttaagcacttgtgttggcactcaatcaccaaaatacttagaaatggcccaagggcacatttccctttcacccattagattagatatgaccagattagatgggatcagaattaaattggtgtaattagattagactggataagatctactgaatttattttggaatagatcatgtttgttacaatgtcatgagttaagcaaagtggtggggataagtatgcttattagaacaagacgagtctctatgaataagatagaatcttttgagattaggataggatagaatcttttcaagataagatggatctattaagataagagagaacctttcgagataagatggatctatttgatatattctagtgggggtacttttagttggtctagtttatcttatgaattctatttatgtctatatgtatatgcagatgtaattgtggacattactccacaactcatcacactcaatcaaagatccaaatcaaacaagtatcataagaacaaacactcaagcgtaaaaatatctataaaatagttttgtttttttgttcctaagagtaggtctcctagtcctaaaggtcactttaggcacatgatttcaaagtgtgaaatccacatttgtctttagaaagaaaagataagaataatcaaagtaaagcggaaatagatgagaaaagattaagaaaagtttaggaaagaatcagagtagaaaagataagtaggtattggttgaccagttctatttaggtttcgtcctacagtcaacattcctctaataccacttctgtcacacccgggttttaggggcctgggcacgaacataaacatcaggtgtgctgggaccaagtctcacacatatgatgaatagtgatacagaaacgaatgtcacaactttattatacaataggatttctatacaaaataaataaataattacatcgtaaagagacaacgatccagcaacccaaagttgactgggagacgacgacctagacctctcacgaacacatcgaagcatcctccatgcgcctcatcatgtggtacctgttcttgacctgtgggggtgtgagacaacaagggtgagctcacatacgttcatagctcaacaagttgtggggaataatatgcatgaactcgccaaaggtgggagttcatgtgatatgtaaggctgatcaacaataggggttaaagctgagcattgcttttaaagttggtcaaaatttttattagcaattactagatataagtaaataccaaaccataataataatagaacaaaattaataataaatctcatgcaatgcaaatgataaattgaatttagtttcataatttaatcaagcgagagtcctaagctgctcatgaccgtgagcttggctagtatactagttttacactctgcaggagttgtaccctttacccacaagtcgtgtatcccatgtcgccaaggttagctatacccttagaaactaccctggtgaatggctagggatccactatgaggcctttacaaagttccactagcttccgaaaaccctctacagtttatgggaagagcacttgcaagaatccctcgtctgaccgccatcgcaacaaaatcaatccgagaacctccctgcatgcaactcccctactgcccttgccccttttgggtaaggtagtcttccactagctttcctaattagtcagccaaggggtcccattcctcccttgtggtggcacgtgtttctcaagttaagctccatgttccaattaaaattaatgatcttgacatgaacataaataaaataacagaataattggaacatggatatattgaaatattaacccaaaaccatgtaaagcaatagcatgactacccaaatgattcaggggtaaacaaggtaaaagataatcagactagggtgacctattgggtcccctcaaaattaaacctatgcatgaataagtgatattaaagaacattattgggtaaagagtggtcaagggcacaacttgtctgggacttgagattccaggtaccaggatgatcttcaggtaactcgtgacctcgcgctagtcgtagcaatacaaacaaacatggtacagacaaaattaacatcacaccaaacataagaataaattgcataatagtaacctacacgtcgctacgagatcgaggttacaattaaggagttataatttatagaaaatctatgtgattaaaattttaaactatattataacttggttagtgtaaatcatatgagagattatcttataaataattaacgcaattttaatctaagtcattactttgattataaatcatcttttagtccaaagataaccataagatcagaattaatattaatattaggacaagctaacccagaaaacatagattagtcaaattagttacctaattatgaaagtatggaatatcataaaatcaatgttgctgctacatagtaaatatttatacaaagctaacgcaactcgaatgggtcaatccggagttaaaatggggacgttatagatttccgaaggttttatgtatctgatacaagattacttaagagattaatttttttatacaattttcatgtcaaaatagtggcactatatgatgaacaataatattacaaaattataggaactggaatggatcaatttagagttcatatgaattttctatgaattatataagttttacaattatttttatactcaaaatcaatttctaaatctatttttcctgtttcctttaattcctagactgggcacataaaatccagagagtacaggggcctcggtgtaggaatcccaagacacagactttggacagcgggtttatatgttaaaagctcggggtttcttttgtaacatgcacggcgaaggggtattgtgtgatctgagtcgtccgatcaagatctaaccgtccggattagatcccaagcctcgcgaaccggtattcttcaggagcccttggatctaaattcaacggtccacagtctatccgtgggttggatcacagggcctgatctatccgtcggcccccagatcgacggttctgattcactgaaaccacacgtcgtcccaattctaatcccaatcgcccagctaggatccaacggttacaaacatttccttttttctaaccattcgtggtcgcataccaaggaaacgacggtcgatgcatcgtcttctccacgacgctattcgccactgcacgtcccagggagacacagccccgccagcggccaaaggcgccctcaaacgcgtgctgacgtgtgcccccgtcaccacgtctatcctaagtcgaacaatggtggtgccgcgccccgctacgtcgagaagtacgccgaacctactaggggcgtgtttggttcggctttttcgaccggcttttacgaaaaggcgggccgtggggaaaagccggtttgttgggaaaagttggtggttagaatttaggtgtttggttcgcccatttgtgcgaaaagttgttcgttagaatctacgtgtttggataaacagattctcatattgcagattctgttcgaacaaaagataaacttaaacagtaaaccaacaaaaggtcattacacaataattagtggagttgattacatcataagtatcattacattgacaaagttaactatgacactaatgcattagcaattgcatctcgaaaagcagtcatgtctaactcatcagatgtgctagtactactctcacctacaggtacatcatgactcaggctattaggtcctacttcatcaaaatctctatcgtgtagagcactatctctaatgaagttatgcaatgtcatacatgcaataattatcttcgattgtttctcaagcgaaaaagaagggagacttagtagaattctccacttcattttgagcaccccaaacgatcgctcaataacattgcgcagcgatgagtgtgcatagttgaatacttctttgctcccaataggttgcctcgcattttgccattccgaaatgtggtacttctgacccttataaggtgcaagctacccctttctatttggataacctgaatcgacaagatagtatttacctgcacaatcatgcaatacaaatgttaaatacttaagacataaaataataccgtattatagaaaagtactacatatttatgtaccttccggtggatgggggaacctgtccgcagaagttatcaaagtatcttgtaatactcttgtgtcatgtacggatcctggccatcctgtgacaacaaatgtgaacctcatatcgaagtcacaaacggccattacattctgcgatgcgtaaccgtgtcggtcaatatatttcgcctgctccgaggccgagactgccgctggaaagtgactaccatcaattgtgcctatgcaatccttgaagtgtggccaaaacctcgcctctcgcaaacgaggatgaatctcgatgaaatttggatcttttggcttgattaagtcagatgacatcttatacagtgcattaaggacttcactatacttgcgactaattgtttccaaggagtgaccaaacttattccttatctgcctaaaagattgtggacccccacatgcccacaagaatatgccaagagcttccatagtactgacaccccgactaggaagcagaccataattttctaccaacgtgtcatgcaatcgtctaaaaacagtttgtcgcatgcgaaacatgtcgaagcagtcgttactaatctccaacgttctctcaacccattgaataccagtttccacccatgttcttctaggaccctgactgaaatgcctgccccaaatgtccacagcatatagagcaacaagcatatcaccgtctgtgtcatccatttcatcatcatcagatgtgtgtgcataaggatcacacatctgcatgcacacaaacaacaggcagaaattcatatgcaaccacagttgtataagcaccatattaatgtagaagcacagtttacaagccacataatcatgtatcataggtgacataaagttcacagattcacattgttcacaagcttacaactctgattattgaaatacatgttcaactcgaatatttggaaaattgtttgaaagggaaaatgatgtgtaagaaaagtttatgttctaagacgacaatcctcataaaactgaaacgacatgactcataaaccagacacaactaacataatactcaacataagcctctgttgtcggaccagcagcatctaattggactttttaacatctatctcgaatgcatggcgcagccaagcgttccttccttctgcggtcttgagtgaagcaaatatatctctatattttttctcaatgaacagatgagtggcaaacaaatggaggtcgcgcgcttcacggtgaaccatcatcgatcacttgttgcaactgcgcactaacctcaacacgcacagggtcggtctcagtagaggtgacggacttgttagtggtccttgaacgcgactcaaaagcctccacaaggcgtttcatgtactcttccctcgaatcttttttcctctttggtttaggagaatcatgacgcaccttacgcttcccagtcgcatttgagcaagggtcaggtgtgctgttttcacccccacctaaagtggcttccaaatgatcatcagatgatgaattagcatcctcgacgcctggaacaagggttctttcatttgtgcagacaatgggtccaaacataatctttagctcgtcctcattctctagggggctgttttgaacataatacaacctggcattgcctgcaccaacatggtagttcctagtttcagatggccaatactaatgttagtctacaaaaaaaagatctacttacttcattttgcttggcccaccactcatctggcgcactgattgaaccagtatgagggtctcgaccaagacctgtagccctttcattaagagttttccactgggtgaacattctctttaaggagtcccacctattcttcatttgatccctggtgtaagtgcgacctgtgcgttccttaaacttccttatcaggttagcatacccttcggcattaagaaattgttctggcatgttccgtgcattgacctcttctacacaaatttctgtgtaaatttttgttgctctactatcccactttgcaatgactttgccagacttgtccatctagtgcaaaacaagtgtacacgatatgaaaatatgtattgaagtgcttttactaagcaaacaaagtgaacacttaactgaccatataataacataaggtactaccataaggagtcacattcggttttacataattacatataaagacttaaggaagtcatgtgctggtagacacaaaagcacagggaacactttacaagtgcgcagtaagcaaaaggctgatctatccctgttaccctaacacctgtcaggtaggttcagcatgttctaacttaaacctcattgtcactaaacgaaggcatctgatcggagtcatattcaacaccccagaagttttcgaagtgctccgcaaagtcccagtctggagtaaggtcgtcgtcggccagggggtggtgaggacaaggtagaaggttcgtagctgctgtcacccgggttgtttacgttgttcacgatgtccaaattctcttgcaacaccagagagtcttgctccagcatgcaagctatgtcctccaatgctacacgaagttttgtagcatcaaatgaggtcaacccgcgaccaggatggattgtttccctcgctaccgaaaaaatcttgtccgcaatctcttgcatccttccaattgccttgtcggctatggagtctgctgaatccatctgatgtggatttattaggtcgttagtataccagacatggggactatctacacaaatttggcgtacttacatgcccaatgcctaggctggtaacaaaggagggtacaagtacgagaaattactagtctcgtctgcactaataacagtacgaacacactatgaatggattaaccaaaaaccgtgaacatatttcctactggatcttcgaatacatacacagcattgtaaagcagtaaaagggattaaaaattgatgtgaacatcaccttcgtaggagtggaggttgtgatgcaacagagacaaacacctaactccccgagatctgaacatcaaatatcatatgatattcgttactaagcagttgacaaattgtcttcattacagggggaagtattaaccacagacgccgatgcaacctaaaccctaatcagtacaaggggaataccggatccgtaaaccctaaaccctaatcagtacatggggaataccggatccgtaacagcgcataggggaggagagaaatgtacctgcgaatacgacgagttcggatacgggaggagtccaaccttgcggacgaactggcggcggcgcggccaaaatcctagcgacgtcaacggtcagggaggtttgcgaaacgaggcaggcggggacgagcggatacagaacggaatggaggaatgtacctaagaagcgaatgccgcggaggggactgtggtcgaggtccccgacccgatgcggcggaggaggaggcggcgacggaggcagagagctgaggcttggagacgacgcgtcggtcgggcggtggtggaaaccctcgcgaatagcccggcttccagcggacgcgttggtcgggcggcttttggtttcctgaacgcgggcggcttctgtgggaagcgcgaccgccagaagctgccctagaagctaggagtttggccgcggctttagcttctggcggctagaatccgcccagaatcccaaccaaacaggggctaggtctaggtgagctacgccataaagaaaggtagggcgagaacgggggttccttaccgaaaggtcctcctaccgcaaccccgctaccgatgaccactcgaacaccgccttcgcgattccacccaccgctgagtgcagtcgcagaagaatcccgacggcagtggtgactagtccgagctccactccggcaggttcaagtcggcgatttccctgacgccgtggagttgagaggggctctacgtggtttggttagagggcacgagaaagggcattatccatcatataatagcagcccggggaatcgccatgcacctccggcatgcacggccggggttacggagatcattgatgttgggcggatgcggcgctcggggaagagataaacagtggctaagggcccccacggcagagagcgcatgcaagaaccgcggaacccgcatgttggtgatgggagtgtcagcactgagtggctcgccaatggggccccgcagaccagcgagaggataggggaagcgcacgagagcggctgcccagtggggtccaacggtcggcgcacggctgacaaggtgggcctgcctatcggcgctgccgcgcgcgcggtcgtgaggcgagaagatgggccgcgcggaggaagactagatgggccgggttcagggattaggcctgcgcacggttttctcttttatttctctttttcttttctgtttgttttactctttttatttcaaacctaaaatttgaattcaaatcttgtggtgaatctgtactcgaattttgaatgtatggtttgaacatattgttatggaataaattcattttgtttacaaatttgttttgtattatatggtcttttctctcttcctttttttcaaattcaaatttaggttttaatccaaatgtggacactaatgtatttctattaatattactattattattattattattattattattttcttatacacatttttggtcttacacttggcctcgggaggaaacttcgcctcgcccgagctcaatctcggccaactaccctagcagtagcgcattaaatgccaccaactccccgcgaatccgagaggagaccatttcgactactgttctgaccacttgtaacaccataaaagccatcaactaaaaataatgaatttagttattatggtaattaggataataaattttttaagtgtttaattatttatttgcactttgaatcatttttctttgtatgcgcatgattgattatcgtgtgtttaatatcaattctttttaaaagaaaatcctagtaattaatataataattaaataatataataattattagtctaaaaataaatatgatatttataaataattttggtgaatttctgggaatttttgagctctttaaaaattcatttcgaaaaaaacaaacaaaactccctaaccctaatcggcccactaggggcccatatatttcctagcaccgcgccgcgccctggctggctcttctccagccaccgccgcaccctactgcttctctctccctctgcccctattctctctcctctgcctctctctctctgttcgagcgcgcaccaggagccctcctcgcgcgcgcgtgctgtgcactcggccgccagccgagtcgtggccccgcgaccccgactagccccgcgcgccaagacgacgagcccgacgcccatgacgacgcgcgacgcccgtgcacacccaagccccgacctgcccgcggccgagcgacccgcccgcgcccagccgaccccgactcgaccggcagaagacgccgacctcgcgcccaatccagaagcagttgcccgatccccgaagccacgcgtccgttcatccacggcattaatggagcttcaatcgcaaccattattctccctgtgttatggagttcaaggcatctgtttcttctttccccattaccgccatcgatggccattgaagacgccgaccgttctcctctccctggctaactctccctctcccctccctctctctataaaagggacccgacaccctctcctctcttcctcccctacccgagctcactctcatttcctcacactctctcgctcgtcgttgttgccggagttcgccggagttcaccgaagcttgccccgccggagcccgcccgacgtcgaggacccctgctcgcctctcttgctcgaccgacctccttgccgagccatctccatttccctgcgcaagcgcaaacccaaggtggaagacaaccccaaattaatttgtgtattttcgaaattcttttgattcaattcatgaattgtatgtttattttgttgtaatatgaacatgtgtgatccgaaatacatgtgtatgtgcgttatggaatttttggtagatatatgcgattattagtacaccatgattgttcatgttagtcgatgcgaagatttttggattagagagaaatatgacgaaaatttagtagtcacacgttggtgataaaaacactagataggaaattttgtagttaaaatttggtcacaatgaattttagaaactatttggagaattatagtcataggtttattttaatggatttagaaaatagtatggaattcgtgtcatataaacattataggattttagatgatttatatccgattatattattaatatttttcttttagaaaaaaggagaaaataccacgagtagtatggaaaatagatttttactagccaaataaaaatgttcgcaagtatagcacttaaattcttagagtaagcaaaatacttgtttatatcaaaataacctcgcttgggttataaaaagttcaattagtaatttatagggatttttagaatattaaatttattttttggctatactcaataataatttgagttagaaataaacaggataaaatctattaatctatttattagtattaaagacgataactatcatttagtttcattgatgatgttaaaatatattaatactagttaaaactgtatttatagcactcactcataaattcaccatttaggactcacaataatagctataattgaattaataagtatttatgcgtttaggacgtatttaaggtatgataagtgcgatgtgttaatgtgtatgtaatggtatatgtttatgtaatggtccatgtttatttattggtgtatgttttctctttgtatggcaacgtacgacgttattagaagctaagtttgtggtagaggatccgaattcatttgaggacgatccataggatacttttgagcaaggcaagtggattctccctctgcatattctttttgtacccaatcattgcatataataatgtttactttttgatatactgcataatttgatgggttttacctaattaaggatttcctagattaccaactttattccttgtttacccttaggaaattattaagctctgcaaacttgtgctaccgctccacttaataacttttatgtcactcattaattgatattaatgttccgataatgaaattgacaattatgacattaacccaatggtaaaacaacattatttcatattaattggaacatggagtgaccacccaggataacagtgcaaccacgagtgctatcatggctctggctttggtaattagctttatatgcttagtgcctggcaaccttacctaaaatatgggcaagagggggagcggtggtgttggcagcccacgttatcatgggtacgtattcttggctaaggtacctcacccagggggtcaccaccatcggctttagaaaccttagcgggttgcttcgtattaagtgtattttgtgaaagcctcataatggatccctagccattcacctcggcagtgtttaagggtccgatcaacccgggctagatgggatacatggcttgtgggtaaagttgtaccacctctgcagagtgtaaaactgctatatcagtcgtgctcccggttatgagcagcctggactcctcacatgataattgaacttgaagatggaattaaactgagatccaatgatctgccaatgatttgcttaagtggtttcacttaagtgtttttttgtatattcatattcctttgttcaaatgggatacatgggattcacacttattagtaagacaggtgttgttaataaaatattgaccaactaaaatgcttactgctcaaccttagcctcaccttgttatacctgcattaatttttcccccacttgctgagccccgaccataagtgagcttacccttacttaattttgatcagagggtgatgctggagactttgatggagattttgacgacgatgaattctaagtttaacgatgcgtcggtcatcttcctgtgggagattgcacatgttatttatttccgctttactttgatgtgatacttgttaaagatacaatgtttcagatgacgtaataaagtattctactccctttacgcctttattgcactgtcttttgatatattacacttgtgatgtcaacatatgtgtggaaatggattctggcacacatatgttatacgctcggttctaccccctagaaccgggtgtgacagaagtggtatcaaagctatgctgaccctaggtcattagattagtaagaaatggaaagcctagttgttcaaaacttgctaatttcattcttataaattattttaccagccttacctctttaaaatttcaactgagttgacatttctcttatagatggttcgtactgtccaaactacccgtgtcaacaccagctacgcccctccgccccggcaaattccggtctacccagtggtagtcgaggaagtttcggtggatctccctcacatccgagtggagaatgtagtcatcctggaggatagcttggaggaacagctgccgacgcccaccccgttggtagaatccctggccttcacatctaggtcatcgacatcggcaccgcctgcaccagccgtccaagcacctgcacccggaggcgacgaccccgacgactctggggatgacgatgacgacgacgacgaaggaggagacgaacacttcaacgaggaagctgattatgcccagcaggactacttcatggggtttggtcctgttgtcgcacattacacatcaatgttcgaaacggggcacttccccaacctgctgcaagacgtgctgcacgcgctaggcacctacgtccgccccctgtacgaaacaaggcgagtgagcgagcctccccggtcttgctactacatcactcgcatccatgtcagggtgatggatgcaggggataggggattcaggactctgtctgctcatgagtccctgacaccactatccacctatgctgcctcggttagcgatgctaccagacggaccctatggtcgctcagccacacctaccgacagtagctgcaggacacgaggttcaggcatcttcctctacgtctgagtggaggaagccagaccagcattgtcccaggtgaagctggtgaggatcgcctcaacaccctagctggtgtagtggccgatctcaacaccgacctggactgtgccaccctagatctctctagggtgcacttggagctagagaatgcccatgccaggattgcagcactggaagcccaacttcaaggactagatccgcccgaagcccaggtccccgccatggcgttgtctcctccccgcaagaggctgcgctatggggagcccagatccgtcactaggctgctttaagtgttttgagttatgatgtaataagttagtcttcgcgtcagacgttgaacactcttttaatttatcttattaataaataacaaccatgtgatggtgttggttgacatgtttgagttggatttttgtttgagtgcaatggtcttatggaatgatggccataagagcatataaaaaaataaataaatttaggatattcccctctagaatcttttctactcctcacttttctaaggatttcacgtcctaaccaatcagatggtgaacgcacgtcaaggacccaacaacaaccagaaccagcgtggtcaacagataccaccaccaccaccaccaccgaatcccaacatggagtagttcatcgaagcccagatgcagttcctgcagggtctcactgcaactgttcaacagattcagcagaaccagctgaatcaacagcatcagcagcagcagcagaacgcacccccggccagagataagcaccgagattttatgagtcatcattcgccaacattctctcatgtggttgatcctttggatgccgatgactggctcaaggtcattggaaagaagttggacatcacccagtgcaacgaccgggagaaggtcttgtacgcctcgggaagactcgagggagccgcgtctgactggtgggatgccttcacagcggcacaccccaacgcggatactataacttggcaagagttccaaacaaacttccgcactcaccatattccctcgggaattatgaagttgaaggagaaggaattcctttcccttactcaagggaatatgacggtcagtgagtatcgtgatcgcttcactcagctttcacgctacgcaccgaaagaagtggacacagatgagaagcgccaagagcgtttccttgaaggactgattggacctctgaactatcaacttcagagtcatactttccccaatttccagacactgctgaacaaggcaattggccttgaaagtaaaagaagggaattatctgaccataaaaggaagtttcaaggtcagcccagcaggaacacccacccgaacaacgctcaaggttcgtagttccgctctggaaatcaaggcggaaacaattatcagatgcaacgctctggacagcaaggctagagaaataatcaaggtcagaaccagcaaaggagcaactctcagaccaaccagaggtctggtgggaattcacagaatcgtcaaggtggcgccgtgaacacgcaggccagaagcaacaacgcaccagtccaacccaatggttgtttcaagtgcggtgagctaggccactatgctaacaactgcccaagatgcaaccagcagacaccccagaaaagcaataaccagagaaatgaccagaacacccccgctcgtggatctgctcagaactagactccgcagaaccagagtagaggaagggtcaatcacgtcaccgcagaatcagtacctgaggatgccgacatagtgtatggtatgttccttgttaactccatacctgcatcagttttattttaatctggagcatcgcattcatttataactgagtcatttgtggaaaaacacaacatacccaagtacccccttaggaagatgttacatattagttcaccgggaggtgacatgaaggccacacactcatgcccccatattaatatcaagattcaaggaatagatttttcagtcaacccagtggtcctaggatccaatggtattgatgtgattcttggatgcaattggttgaagagttgtatggagtgatacagtgtgccaatggaacaattatgttgacaagtcctcaaggtgaaagaatccaagttagcatagataagtcaacagatgcaaaagggaagacagtgataaatcacttggaagaaaagcccttagaaaatatcaaggtagtgtgtgagtacccagacgtatttccggaggaattactaggtatgccacctgaccgtgatatagagttttctattggattattacctagaaccgcacctatctcgaaaagaccttatagaatggatgtcaaagatttagtagaactgaagaaacaaatagaagaattactagaaaaatgtttcattcgcccaagttcatccccttggggagccccagttctatttgtgatcaagaaggatggttcgaggagaatgtgcgttgattatagaagtttgaatgaagtaaccatcaagaataaatacccattacctcggattgaagatttatttgatcagatgaagggagctaagatattctcgaagatagatctgagatcaggatatcaccagttacaaattcgagcagaagatgtacccaagacagccttcacgacgagatatggattatatgagtttttggtcatatcgttcggattgactaatgcaccagcatactttatgaacttgatgaataaagtattcatggaatatctagatcagtttatggtcgtattcattgacgacatactgatatactctctgaataaagaaacacatgaagatcatctaaggctagtcctacaaaagctttgtgacaaccaattatatgcaaaactctcgaagtgtgatttttggttgaaggaagttgctttcttaggacatattgttactgatggtggaattaaagtggacccaagaaagataagtgagatactggattggaagcaaccaaaggatgcgtccaagatcagaagttttcttggattggcaggatactacagaagatttattgaaggtttttccaagttagtgaaacctcttacctctctactggagaaaggtaaagagttcaattgggatgatgcatgccagaattgttttgaggaactcaagaaaaggttaaccactgcaccaatattggtaatgcgagacatccacaagggatttgatgtgtattgcgatgcatcacaccttggacttggatgtgtactaatgcaagaaggaaaggtaatagcctatgcttcaaggaagttgaggaagcatgagaagaattatcctacgcatgatttggaactagctgccgtagtgcatgctttgaagatttggaggcactatatgattggaaacaagtgcaagatcttcacggatcacaaaagcttgaaatacatattcactcagaaagaactcaacctaagacagagaagatgacttgagttgattaaggactatgatttggaaatacaatatcaccccggaaaagcaaatgtagtagctgatgctttgagccataagggtcaagtgaacaacatcactactcatttgatgtcacgagaattgtctttgggaaatggaacaactcaacctgggtatgctcaataatgtagaagcaacggttatggaagttgaatctactttggaagaagagattcgtaaaggacaagagtccgatgagaaaatcaaggaaattaaaactttgattggtttgggtaaagccccagatttcacggaagatgaacaaggcatagtatggtttaagaagagaatctgtgtaccagaaattgaacatttgcgccaacttattttgagagaagctcatgattcagcttactctattcaccctggtagtacaaagatgtaccaggatctaaaggaaaagtattggtggtacggtttgaaaagagatgtggctactcatgttgcattgtgtgacgtgtgtcagcgagttaaagccgaacatcaaagaccagcaggattactacaacctctcaaggtacctgaatggaaatgggaagaaatcggtatggattttatagttggactacctcgtactcgggatggctatgattcaatatgggtcatagtagacaggttgactaaagtggcacactttatacctgtgaagacaacttactcgggagcctagttagcagagttatacatgtcgaggattgtttgtctgcatggagtaccgaagaagatcgtatcggatcgaggaacctagtttacctcgtgcttttggaaaagactacatgagtccatggataccaagctaaattttagttcagcttatcatccacaaatggatgggcaaacagaaagaacaaaccaagtgttagaagatatgctaagagcttgcgctctaaaacatggtagaagctgggacaaaagtttgccttatgcagaattttcatataacaatagttatcaagtaagtctaaaaatggcaccaattgaagcactttatggacgaaggtgtagaacaccgctttattggaatcagactggaggaagtcaagtatttggtccagaaattctccaagaagtcgaaaagcaagtgcagattattagagaaaatttgaagacaacacagtcaagacagaaaagctatgctgataatagaagaagagagttgatgttcgaagtaggagacttcgtataccttaaagtttcaccgatgagaggaatgaaaaggtttaaggttaagggaaaattatctccttgctatattggcccattcaagattttggaaagaaaaggtgaagtagcctaccaattagagctacccgatagattattggatgtgcatgatgtatttcacgtgtcacaacttaagaaatgcttaagagtaccagaagaacagttacccatggaagaactaaatgtcaatgaggatttgacttattcagagtacccagtcagaattttggaaacatctcgcagaattacacggactaaagtcattaatatgtgcaaagttcagtggagtcatcattcggaagatgaggccacttgggaaagagaagatgaactcatagcagaattccctcagttattctcggaagtttcttaatctcggggacgagattcttttaagaggggtaggtttgtaacaccataaaagccatcaactaaaaataatgaatttagttattatggtaattaggataataattttttaagtgtttaattatttatttgcactttgaatcatttttctttatatgcgcatgattgattatcgggtgtttaatatcaattctttttaaaagaaaatcctagtaattaatataataattaaataatataataattattagtctaaaaataaatatggtatttataaataattttggtgaatttctcgaaatttttgagctctttaaaaattcatttcgaaaaaaacaaaactccctaaccctatccggcccactaggggcccatctatttcctagcaccgcaccgcgccatggctggctcttctctagccgccgccgcaccctactgctgctctctccctctccccctattctctctcctctgcctctctctctctctgttggagcgcgcaccaggaccctccccgcgcgcgcatgctatgcactcggccgccagccgagccgcggccccgcgaccccgaccggcctcgcgcgctaagccgacgagcccgacgcccacgatgtcgcgcgacacccacgcgcacccaagccccggcctaccccgcggccgagcgacccgcccacacccagccgaccccgactcgaccggccgaggacgccgacctcgcgcccaagccaggaacagccgcccgatgctcgaagccacgcgtcctttcatccacggcattaatggagcttcaatcgcgaccattattctccctgcgttatggagttcaaggcatctgtttcttctttccccattaccgccatcgatggccattgaagacgccgaccgttctcctctccttggccgactctccctctcccctccctctctctataaaagggacccgacaccctctcctctcttcctcccctacccgagcttactctcatttcttcacactctctcgctcgccgttgttgccggagttcaccgtcgtcgccggagttcgccggagttcaccggagcttgccccgccggagcccgcccgacgtcgaggacccctgctcgcctgtcttgctcgaccgacctccttgccgagccatctccatttccctgcgcaagcgcgaacccaaggtggaagacaaccctaaattaatttatgtatttttgaagttcttttgattcaattcatgaattgtatgtttattttgttgtaatatgaacatgtgtgatccgaaatacatgtgtatgtgtgttatggaatttttggtagatatatgcgattattagtacaccgtgattgttcatgttagtcgatgcgatgatttttggattagagagaaatatgatgaaaatttagtagtcacacgttggtgataaaaacactagataggaaattttgtagttaaaatttggtcacaatgaattttagaaactatttggagaattatagtcataggttcattttaatggatttagaaaatagtatggaattcatgtcatataaacattataggattttagatgatttatatccgattatattattaatatttttcttttagaaagaaaggagaaaataccacgagtagtacggaaaatagatttttactagccaaataaaaatgttcgcaagtatagcacttaaattcttagagtaagcaaaatacttgtttatatcaaaataacctcgcttgtgttataaaaagttaaattagtaatttatagggatttttagaatattaaatttattttttggctatactcaataataattcgagttagaaataaaaaggataaaatctattaatctatttattagtattaaagacgataactatcatttattttcattgatgatgttaaaatatattaatactagttaaaactgtatttatagcacccactcataaattcaccatttaggactcacaataatagctataattgaattaataagtatttacgcgtttaggacgtatttaaggtgtgataagtgtgatgtgttaatgtgtatgtaatggtgtatgtttatgtaatggtgcatgtttatttattggtgtatgttttctctttgtatggcaacgtacgacgttattagaagctaagtttgtggtagaggatccgaattcattcgaggacgatccgtaggatacttttgagcaaggcaagtggattctccctctgcatattctttttgtacccaatcattgcatataataatgtttactttttgatatactgcataatttgatgggttttacctaattaaggatttcctagatttaccaactgtattccttgtttaccctggggaaattattaagctttgcaaacttgtgctaccgctccacttaataaattttatgtcactcattaattgatattaatgttccgataatgaaattgacaattatgacattaacccgatggttaaaacaacattatttcatattaattggaacatggagtgaccacccaggataacagtgcaaccacgagtgctatcatggctctggctttggtaattagctttatatgcttagtgcctggcaaccttacctaaaatatgggcaagagggggagcggtggtgttggcagcccacgttatcatgggtacgtattcttggctaaggtacctcacccagggggtcaccaccatcggctttagaaaccttagcgggttgcttcgtattaaatgtattttgtgaaagcctcataatggatccctagccattcacctcggcagtatttaagggtccgatcaacacgggctagatgggatacatggctggtgggtaaagttgtactacctctgcagagtgtaaaactgatatatcagccgtgctcccggttatgagtagcttggactcctcacataataattgaacttgaagatgaaattaaacttgtcggcgtttcgagaccggggggtccctgggccgacgagtgaatgtcgctgcgtgccccagcccagatgggtcgagcgcgagggtgagcgcgaaggggggagagcgaggcggccggagaccggcgtgagagaggtgggaatcccgcggccttcgtgttcgtcccacgcccaggtcgggtgcgcttgcagtagggggttacaagcgtccacgcgggagagggagcgagcggctccaagcgagcgctgtctcgtcctcgtcccgtcccgcggccaaccctctctaagagggcccctggtccttccttttataggcgtaaggagaggatccaggtgtacaatggggggtgtagcagagtgctacgtgtctagcggaggagagctagcgccctaagtacatgccgttgtggcagccagagagattttggcacccagctagtgtgatgtcgtggccgtcggaggagcgatggagcctggcggagggacagctgtcggagcggtcgagtccttgctgacgtcctcttgcttccgtaaggggggtgagagccgccgtcgtcacaaagtacgcggggcgccatcattgcctatctggcggagctagccagatgggacaccggtcttgttccctgtggcccgagtcagctcggggtagggtgatgatggcgcctcctgttgacgtggccagtctgcgccctaggttgggcgatgtggaagctcctccgaagtcgaggtcgagtctgtcttccgtggccgaggtcgagtccgagcccttgggtcgggcgaggcggagttcgtcgtcttctagggctgagcccaagtccgagccctaggtcgggcggagcggagttcgtcgtcttctggggccgagcccaagtccgagccctgggtcgggcggagcggagatcgccgtcttccggggctgagcccgagtccgagccctgggtcgggtggagcggagttcgccgtcttccgggacttagcccgagtccgagccctgggtcgggcggagcggagttcgccgtcttctaggacttagcccgagtccgagccctgggtcgtgcggagcggagttcgccgtcttccgggacttagcccgagtccgagccctgggtcgggcggagcggagttcgccgtcttcgggacttagcccgagtccgagccacgggtcgggcgggcggagcttcctatgatgccttcggcggggcctcgaccgcctgtcggtttcactcgtccaagtggcaccgcgatcggagtggcgcaggcggcgctgtccttccgtcaggtcggtcagtggagcggcgaagtgacggcggtcacttcggctctgccggctggggggcgcatgtcaggataaaggtgttaggccacctttgcattaaatgctcctgcgatttggtcggttggtgcggcgatttggtcagggttgcttcttagcaaaggcagggcctcgggcgagccagaaatatgttcgccgtcggaggggggcctcgggcgagacggaaatcctccggggtcggccgcccttgtccgaggctaggctcgggcgaggcgtgatcgagtcgctcgaatggaccgatccccgacttagtcgcacccatcgggcctttgcggctttatgctcgatgggggttaccagcgagaattaggagccttgtgggtacccctaattatggtccccgacagtagcccccgagcctcgaagggagtgttagcactcgcttggaggcttttgtcgcacttttttgcaaggggaccagcctttctcggttgcgttttgttccggtgggtgcgcgcgagcgcacccgccgggtgtagcccccgaggcctcggaggagtggtttcactccttcgaggtcttaatgcctcacgtaatgcttcgacggcccgggttgttccctcatgcgagccggccgtagccgggtgtacggtccagtcccaagttctcgagctggtatgttgacgccgtcaacggttcggccggagccgggtttgcgagagcagccccgagcctcgcacggtgcgagagggcgatcagggacagaacttggcttttttacatacgcccccgcatcgccttttacgcaaggaggagggggaaagcgccatgttgccctcgatgggcgccgaacatggtgtctccggtgagccgcaagcgggtaatctgagtggacgtccgtgccccgttcgttaggggtcggctaggggcccagaggcacgcccaaaagtactgcgggtgatcgcggacccggtcccccggcgacgtggtccgagggcttgatgcctcccctcgatgggatttcgttacaagatcgctcccgctggtctcggaaatgtcctagggtacctcgggagcgcagcccgagccttggttatgtatcgaacgtacccatggtcatccctcgctcggcgtcgaggcggccgtgaaccccttcgggggccggccttcgaacccccgatcgaatgggcgcggagcccgagtagcctgaggcggccgtggaacccttccgaggggccggccttcgaacctctgaccagtagtgggtgtagggcccacgcgatctgaggcggctgtcgaacccttccagggggccagccttcgaacctctgatcagtagggaggctcggagcttggttccttcacggggaaggatccttttcggggtatccccctttcccggtccctgttgcaagagagagaaagagtaaaaaaggaaaaggatacgaaatcgaacgacgcgatgtaccttttttggcgtggttattatggcgaaggcgaagcgtcgcccgcttctcctgccagaggcgccgcctgtcccgccgcgaagttaatgtgacggggcgagtggttggcggggcggccgttgcgcgtgcgcgagccgtttgaggaacggaacacgcgcgttgtcttcacgccgtgagggagggttctctcgctgcccccggatgggacgtgagcttggctgacgacgtgaccgctgctcctgcccgcctgccaccgtcattactgccggcccatttttggtcggactgaccgccgcgctaggctggcgctgctgggtcgtgcgctgagttgcctcgagtcgcggtattggttctgcaatcgaggaggcgcggtggtggcgcaagcggcggtgcagttgcatgcacgaagcattcggcgcgccggttgcatgacgcgtgggcctgggcctccaggctgggtgtgttgggagtcggagaagcgcgcccacttggcacggttgcatgccgcctgcatggctgcccgcccctttcgcccgttggtctgggcaaaagtggagggtcacttgtaaccgttaggcggttgtgcgcaccgcgcacggcggtttggcttcttctgctctgagccggcttgcaagacgtgtgggacccagcccccgcgccgcaggggagggccttggagcgtgttggagaagactcagcccgtgacggctggggacgcaagtagggatagtcgcctttaaaaggagggtgacccccttggaaggcgaccatgtctttgtgctcccttatgcatcgtgtctttccaccttccaagcccccggatgggggatacccgccgtctttctgccttgtcgtcgggggaacgcaactccgtgggagttggtacctttcagccatcattcggcttcaaggattttcttcatgcagcccggctgcacccctccgctggtggtcacccaagatggtgacctccagtttgatggtgggggaaagcgagccgggctgtggcctctgcccctccctcagcctcaaggattttcatcaccagggctggggaggggagtgtgccgagttggggtcggcccctgcgtgggcggtggcccgctccttcactcggtgatcggagggaagggcggtcgtcgtccgtggcgccgccggcagcggcgtgccggctctcgggcgcgagtggctcggagccgctcgcggcgccgccggcgtctgccacggcagctggaagaggttcttccgccgacgagatagccagggccgcccacgggccgacctccaactctacggccttctgcctgtccttgcctcacgagtttgggcatgggcgggggcctcttggcagcagcatccgccctaaggttagtgctgccgctgttcggccccccggagcagaagtcgtcgtcgtcgctgctgttggagcgggcaacggcgtgccgttcgtcggtcttctgttgctccgcagggcttcccccatcgagtggggttgttcgtacctgcggaggtggaaccggagttccgtttgtaatggcactttgaatgctagtgtttttgttcattgtggctgtcgaggcctgaacatgtatgtaattttggcacggagccgtgttttttcctcattttcgagcactaagactcgcctgttggttgtctgaaccacttcaccaagcgtgagtcgccccgtgtcaaggtgacgagtgaggtatccgtatcccggaggcgtaggagtccctcggctcggtcggccttgttgtccgaggctcctctagcttagttaaagggaccccttggccgctcttggatgagccgaggccaggggtagcgacatcagcatgaacaggggcagagttggctcgaaaatgaaacctggttggccggagcctagccgggtcgtccgttagcgggaccgacgccggagttgaccagccgaagcctcgggtcgggctagcgccctcggaggacgactggccgaggccccggggtgaccggccgagccgcctgctcgggccggattcccggagaagaccctggcagcgattgcccgggcgtggtgatgacttcgtccttcagagtggagatcctcggaccgcgtcgccgtccgaggctaggtcggaccttgccgaaggtgtcgtcgatgccgagggtgctactgcccccttccagcgtcaagacccgagcttgcaggatcagattgtcttgtagcgtgtgtctcctgcggccgccgaggccagaacacaccctcgctgtgttgtaaagctgcgtctcttttccttttgtttcgagtatctggacttttttgtcggtaacagggatgtttgtgcgggcgagagttgcttctcgcggaaggtgatgagtgaggtatccgtatcccggaggcgtaggagtccctcggctcggtcggccttgccgcttacgcgcacttttacccgtccatgaggctcgtcaccgactccgtccaaaaaggctcgaaggatcgcttcggcagaagaacttccgaacgtgaagacttgttcggtccgcggaatcacttatccgaacgtgagttacttatcgcagaaggtgatgagtgaggtatccgtatcccggaggcgtaagagtccctcggctcgatcagccttggccgcttacgtgtactccgtcgttttcaggatccaattttcgaagtagtcaaaaagcatgaaagacattctggtagaagagatcttttttcgaggaaaatttcaacgcagagggggttaccccccttttagccctcgagggagggtcgggctttgccgaggcgaggccgacccttccttgatgactaaactttgcgtgggtgcgaggtatatgaacaacttgaaaatatcttaagggtagaagcgacgtagctgttggatgttccaagcgttgtcgtagacctcgccttgactgttggccagcttgtacgttccgggcttcagaaccttggcgatgacaagcggcccttcccgggagtgcgtgtagcccccgggtgccctcaacaagggctcggggtgctgtgcgatggtcgtgatcttctccgggttggcttcgattccccgcttggagatgatgaaccccaagaccatgccctggggcaccccgaagatccacttttcaggattgagcttgacgcctttcgcctctttgatggactctgccgccattagcttgtggatctccttgcccatggttctgcgctcctcctcgtcgaatcggcgcagaggctgcttgacgggtcgggctccggcccgaatatctagcgagtgctcggcgacatccctcggtatgccgggcatgtccgagggactccacgcaaagacgtcgacgttcgcgcggagaaagtcgacgagcactgcttcctatttgggatcgagctcggagccgatccggatctgcttggaggcgtcgccgctggggtcgagggggacagccttaaccgtctccaccggctcgaagttgccggcatggcgtttcacgtctggcacctccttagagaggctttccaggtcggcgatgagggcctcggactcggcgagggcctcggcgtactccacgcactccacgtcgcattcaaacgcgtgtttgtacgtggggccgacggtgatgaccccgttggggctcggcatcttgagcttcaggtaggtgtagttggggacggccatgaacttctcgtagcatggccttcccagtaccgcgtggtaagttcctcggaacccgaccacctcgaatgtcagggtctcccttcggaagttggagggtattccgaagtagacggggaggtcgagttgtccgaggggctggacgcgcctcccgggaatgatcccatggaagggcgcagcgcctgctcggacggaggacagatcgacacgcaggagcccgagggtctcggcgtagatgatttgaggctgctgcctccgtccataaggaccttggtgagcctgacgtcgccgatgacggggtcgacgacgagcgggtatttccccgggctcggcacgtggtcggggtggtcggcttggtcgaaggtgatgggcttgtcggaccagtctaggtaggcggcgccgccaccttcaccgagcagacctcccggcgctcttgcttgcggtgccgagccgaggcattcgccgcttgcccaccgtagatcatgaagccgtcgcggacctcggggaactctcctgcttggtgatcttccttcttgtcgtcgtcgcgggccctgccaccctccgcgggtggcccggccctgtggaagtggcgtcgaagcatgacgcactcctcaagggtgtgcttgacgggcccctggtaataggggcacggctccttgagcatcttgtcgaagaggttggcacctccggggggtttccgagggttcttgtactcggcggcggcgacaagatccgcgtcggcggcatcgcgtttcgcttgcgacttcttcttgcccttcttcttggcgtcgcgctgagcagatgcctcgggagcatcttccgatgggcggccctggggctgcttgtccttttggaagatagcctcgaccgcctcttggtcggaggcgaacttggtggcgatgtccatcagctcgctcgccctggtgggggtcttgcgacccaacttgctcaccaggtcgcggcaggtggtgccggcgaggaatgcgccgatgacatccgagtcggtgatgttgggcagctcggtgcgctgcttcgagaaacgccggatgtagtcccggagagactcacccggctgctgccggcagcttcggaggtcccaggaattcccggggcgcacgtacgtgccctggacattgccggcgaaagcttggactaggtcgtcccagttggagatttgccccggaggcaggtgctccaaccaggcgcgagcggtgtcggagaggaacagggggaggttgcggatgatgaggttgtcatcatccgttccacccggttggcagagccgagacggtagtccgcgagccacggttacggtctcgtctccccgagtactttgtgatagtagtcgggggtcggaaccgggtcgggaacggtgcccgtcggatggcccggcccgaaggctgcgggaccgggcggttcgggcgagggactccgatcctccccgccgtcgtagcgtcccccatgcccggggtggtagcctcggcgcaccctctcgtcgaggtgggcccgacggtcgcggtgatggtgctcgttgccgaggcggcccggggccgcggcgcggtgttgcgcgtgcgccggtgtagaccgaggcttcccgcatcaatcgggaagtcgcggcatgaggttccgaggggtatccccgcctcgggaggcgtagctctcggctgtcggaccacggcgccttccgggagattcttgagttccccctggattcgccggccctcggtggttgatggctccggcatcgcgcggagaagcatcggccgtcgctgcagccgaggttccggccgaccccactagatgcgggtggcggccgaccccgacgtcgtcggcgacacggcttgccggaagccccgggcggatgacgtatttctccggccgagggttggcccgcccatgctcgcccgacgtccggcggatcggctcaagcgctcctgctcctcgtcgagcccgacctgcacccccgcggatttgctcgagctgtgagtcatggccccccgcctgaacggggaccacagctagctcccgtgggatgtcaacgcggggcaccggcctagggagatcaccgtccttcggcatgccgagatggttgccttcggagggaccccctagatcgacgtggaaacattcgtggcttgggccgcagtcctcgtcgccgaggctacgactaccgtcggaacagtcggagaggcagtagtcacatgcggtcatgaagtcccgcatggcactggggttgccaagtccagagaaatcccagtagatgctgggctcgtcgtcttcctcggacccggagggcccgtaggtcgagacgtccgtcggcccggtcccaaggcgaccgcatgcgaaaccccggagggtttggactcgcctcgagagcgcccgccaagcggtggtcgctaggcgggttgaggctgaatccaaatgacgtgggacgggaatcggtcggtacctcttggtcgacgagcggtgataaagtcacgtcggggactgactgcaccgtcgtcttaggtacgagggtgacgtccagcaagcttttcgcgagcgcgctggcgtcgtccgcttgctcgggatcggcgtgttgcgaggagacggcgctcgtcttcgtctcaagcgcgaagtcgatacctggtgcgccccccgttggggtgccggtgctgtcgactcgctcgacagccaacgaggcgctgcctcctgcttggccttggttgccctgccttcccctccgccggcggggaaggaggcgggatgagctcgaaggttgttcttccaccacgcggggaaggcgtcgtcgattccgccgccggcgggtgggctgtcggccgccattgtcattgtcgcgcggcggcggaaggagtatcatgtcgtagccgctgtcgagggacatgaactcaagactcccgaaacggagcaccgtcccgggttggagaggttgctggaggcgcccatccggagcttgacgggaaggcgttcgtcaacacgcagcaggcccctacggtgcgccaacgcatcggcgtttcgagaccggggggtccccacgggccgacgagtgaatgtcgccgcgtgccccggcccggatgggtcgagcgcgagggcgagcgcgaagggggagagcgaggcggccgggagaccggcgtgagagaggtgggaatcccgcgaccttcgtgttcgtcccgcgcccaggtcgggtgcgcttgcagtagggggtacaagcgtccacgcgggagagggagcgagcggctccaagcgagtgccctgtctcgtcctcgtccccgcgcggccaaccctctctaagagggccctggtccttccttttataggcgtaaggagaggatccaggtgtacaatggggtgtgtagcagagtgctatgtgtctagcggaggagagctagcgccctaagtacatgtcgttgtggcagccggagagattttggcacccagctggtgtgatgtcgtggccgtcggaggagcgatggagcctggcggagggacaactgtcggagcggtcgagtccttgctgacgtcctcttgcttccgtaaggggggtgagagtcgccgtcgtcacagagtacgtggggcgccatcattgcctatctggcggagctagccagatgggacaccggtcttgttccctgcgacccgagtcagctcggggtagggtgatgatggcgcctactgttgacgtggccggtctgcgccctaggttgggcgatgtggaagctcctccgaagccgaggtcgagtctgtcttccgtggccgaggtcgagtctgagcccttgggtcgggcgaggcggagttcgtcgtcttctagggctgagcccaagtccgagccctgggtcgggcggagcagagttcgtcgtcttctggggccgagcccaagtccgagccctgggtcgggcggagcggagatcgctgtcttccggggttgagcccgagtccgagccctgggtcaggcggagcggagttcgccgtcttccgggacttagcccgagtccgagccctcggtcgagcggagcggagttcgccgtcttccgggacttagcccgagtccgagccctgggtcgggcggagcggagttcgccatcttccgggacttagcccgagtccgagccctgggtcgggcggagcggagttcgccgtcttccgggacttagcccgagtccgagccccgggtcgggcggagcgggagttcgccgtcttccgggacttagcccgagtccgagccctgggtcgggcgagcggagcttcctatgatgccttcggcgaggcctcgaccgcctgtcggtttcactcgtcaagtggcaccgcagtcggagtggcgcagcggcgccgtccttccgtcgggtcggtcggtggagcggcgaagtgacggcggtcacttcggctctgccggctcgggggcgcgcgtcaggataaaggtgtcaggccaccttttcattaaatgcttctgcgatttggtcagggttgcttcttagcgaaggcagggcctcgggcgagccggaaatatgttcgtcgtcggagggggcctcgggcgagacggaaatcctccggggtcggctgcccttgtccgaggctaggctcgggcaaggcgtgatcgagtcgctcgaatggactgatccctgacttagtcgcacccatcaggcctttgcagctttatgctgatgggagttaccagctgagaattaggagccttgtgggtacccctaattatggtccccgacaaaactgagatccgatgatctgccaacgatttgcttacaaagcctcaggcttgggacactcggcaaagataatggtcgtcagctatcgacggctgttgacggccctttgccgagcgtcactcgccgagtgtttggcactcgacaaagttgtctttgccgagtgtctccctgtgccgagagtcctactctcggtaaacgtggtcgttaccgagagtaggactttgccgagtgcgacactgggcaaagacttctttgtcgagtgcctgaaaaaagcactcgacaaagcgccggattctggtagtgcgccaccggaattatcccaatgcgagttaggttttttgcttctgctgtcttttgtgccgccgatgtagtcctcttcatcccaagcgccgacgtgcatatgcgatcgggagagcatgcctttgaaaccagttgccttggagatcctccacgaggaggaggcaaatatggtttttgggaagtgtcttcacgcagtcatcttcttgtcgaccctactgccgacgtcgtcgatcctactacatcgacgctgtcgaccatactgcttcaatccacgtcgtcaaccagtatatctgatcagtacgcatcatctgatttaacctcacacttcatttatctattataatagaggtgtgccgcatttttatgattattctgttaggtaacccgttaagttacttgttaggtaacaatcacctagattatttattgttggccatggtttatattctgaatttaatccgaaatatatctaattactcaacaggaacacactgagaacaatgttcgttatctgaaaaacgctgcagcaatttccatctttggcaagactttgtcggcatgttttttaaatagaaattttcattgttgggcttattattataataatttcgttcttaaatatttatcgttcgctagttcattttttaactaaaacgcgacaaataaaagtagttttttttgtgtgtggtggtcatgttctagactttagtacaaggccccgagttttgtcggcacagccctgatcacatgagcaatattctatcttcgcaagaaactttttaagattcagaatgcagtaatctatcctccaattaatctagaacattctaccttcacgaatcggatatttcattttcatataaaaattgaagttttaaaaattatatattcatgtactagaagtaaaaaaataaggggaaaaactcacgcaacgcaacgctatggcgaacatcaaatacaacagtgcgggtgggggcaaaattaaatacaaagatattttggatggaactagcagcccaaaatgcagtttagaacagaagagagcaggtggatgggccactagtccaccagtggccagaatgattcccgagcagcgtttcgtaccccgttgactcttttgatgttgcgacatggcgtcgtcatcggtggttggctggttgccgtcatgccccagcctcaaaaggtgaaagagaccctgttggcgatggttgcgatagtctgccactctgcctgccactctctggtggtgctgattgactgattcctatttcctggtgtgtgaccagctgtgcacacggccacacgcccttgtaactttaattactactctctatgttctactagctgagttaccgtgggttgcaacgggaatatataataccagtatactacgataacttatatacaaaatatgtgttatattgttatgagaaaatgtttcataatcaatttgtgatcctagccatacataaattttattattttaatctagttttttcaccactacattgcaaccatcagtatcatgcagacttcgatatatgacacgatttgtatggtcttatcattggaaagcacgttccacacatgccggaagaaatttcctcgtatatcgttagtcatcagacacgcaccaccatacgctcttacttaaacaaaaaggtaagtatgtgtttgcgaagagaattaaaggcaggccggcaaaaaagctaccctgacggtggcgaggatgatgaacgggtcactgttgtcgatcctcctctgcgtcacctccggtgccaagatgacgccacaatcctcgatatagtagtcgtcgaacgcgcgcgacatgacgagtaccgatgactcttggttgggctgccaaatgaagtgcaccccggactcatcagcgaggtagtacccctggccgttgcatcatcggatgcgctactccactacatacatcatattcgaggacactcacacaacgtcagcaacgtctatcgtcccagcgcacaagaattcatgtccggtcagtagcgacttacgtggcaggttgggcttcaggtggacgatgagctggacggcgtgatggcattgtcgtcggatgcggtgtccagaacaactcgagagttgtcgacgttggcgacaaacatgagccccctgcttaacgatggacagcgcggtgtagctcctttggaccacgtctaagcggcggcttcgcgggagcttgtcgtacacagtggcgcatgcgaccacgtaggactgcttttagaggtcgaactgacagtcgccaagcttcttctcgtcatcgatgagcgacgccaacgcgagtgcctcctgctcatggtgtttgttcggggtttcaagtaagaaatgtggattcatgtttggcgttggtttatgaaaataactcacaagtctgatccatggacaaaatattacgaagaaaaaatgtcacacatgcaaaaaaagaaaaatttaagtataatacattattcaaacaaaagaaattgcatgcaaagctcttctttaactaatattacctccatccaaaaatataattcaagaatctcggtgatacttatctactactacgcattgtgcaagggtagcaagtgagcttggtgagagatgtagtagatgtgtttcctgtcatagatgtagacataaacacacatgtggtgtagtggtaggtactcttggcatttgcttgagtggtcacgggttcaaatccccttgaggacatgtttgttttttttaattttagctaggcgtgggctgtacgggggaatgagaatgagaatgggctttgctgggaggtgggaatgagaaagacagaacaaagaatgagattgacataacatgggaatgagaaacgcagaacaagaaataggaatggtggcagaacgggaatgacagaacaggaatggtggcagaacacgggaatgacagactactcttgcagccttaataagtagtagagatatctagtttgctttttaaaagatcttagagtagaaaaataggtgctctaaaagtttaagtacaactcttaaaatttaatgaagtttctaacttttagttaggtgtttagtaggctttggctagcttctttttagattttttctctcttaagccatgctaaacatctatatatgctaggtgagtgaccgtgcgttgcaacgggaacatataatatcatgataatttatatacaaaatatgtcttatattgttataagaaaatgttttataatccatttgtgatcctggtcatacataaattttgttattttaatttagctgtttcactactacattgcaaccgtcagtatcatgtagacttcgatatatgccacgatttgcatggtctcatcgttggagagcacgtgccacacctgccggtagaagttccctcgtacatcgtcagtcatcaggcacacaccatcatacacgcttgcttaaaaaaagggcaagtgtgtgtgtttgcgaagagaattaaagatagaccggcacaaaagctaccccaacgatggcgagtggtcattgttgtcggtcctcctctgtgtcacctccggcgccgagatgacgccacagtccttgatatagtagtcattgaatgcacaagacatggagagtaccgatgactcttggctgggctgacaaacgaagtgcaccccaggctcatcagcgaggtaatacacatggccgttgcaccaccagaactgctactcctctacatacatcttgttcaaggatactcacacaacgttagcaacgaccgtcgttccagcgcacaagaatttatggccggtcagtagcaacttatgtggtaggttgggcttcaggtggatgatgagctggatggcgtgatggcgttgtcgttggatgcggtgcccagaataactcgagagttgccggcgttggcgacgaccatgaggtccccctgtttgacgatggacagcgcggtgcagctgctatggaccgcgtccaagcgacggctgcgccggagcttatcgtacacagcagcgcatgcggccacgtaggactgcttccagaggtcgaactggcagtcgtcaagcttcttctcatcgccgatgagcgacaccaacgctcgcctcctgctagtggtgtttgttcggagtttccaagtaagaaacatgtattcatctttggcattggtttatgaaaatgactcataagtcagatccatagaaaaaattattacggagaataaatgtcacacatgtaaaaaaggaatttaagttaaaacattattcaaacaaaagaaattgcatgcaagtctcttctttaaatactactcactgcatccaaaaatataattcaagaatctcggtgatacttatctactactacacattgtgcaagggtagcagatgggcttcgggagagatgtagtagatgtgtttactgtaatagatgtagacataaacacacatgtggtgtagtggtagctacgagcacatttgcttaaggggtcacgggttcaaatccccttggagccatttgtgttttttaatttaattttagctaggcgtgtgatgtatgtgggaatgggctttgcggggagggggaatgagaaatgcagaacaaggaatgagaatggcaggaaatggtggcagaacatgagaatagactgtgcggggagggggcaatgggaaaggcagaacagggaatgggaatgtcaattgtgctaggaggggggaatggaaaggcagaacagggaatgagaatgacagaacacggaatgacagcctaccccttactgtcttaataagtagtagagataagaaaatgttttataatccatttgtgatcctagtcatacataaattttgttattttaatttagctgtttcactactacattgcaactatcagtatcatgtagacttcgatatatgccacgatttgcatggtctcatcattggagagcacatgccacacctgccgatagaagttccctcgtacatcgttagtcatcaggcacacaccatcatacacgcttgcttaaacaaaaaggcaagtgtgtgtgtgtgtttgcgaagagaattaaagatagaccggcacaaaagctaccccaacgatggcgagtggtcattgtcgtcggtcctcctctgcgccacctccggcgccgagatgacgccacagtccttgatatagtagtcatcggatgcgcacgacatggcgagtaccgatgactcttggctgggctgacaaatgaagtgcaccccgagctcatcagcgaggtaatacacctggtcgttgcaccaccagatctgctactcctctaaatacatcttgttcgaggacactcacacaacgtcagcaacggtcgtcgtctcggcgcacaagaattcatggccggtcagtagcaacttacgtggtaggttgggcttcaggtggatgatgagctggaaggcgtgatggcgtcatcattggatgcgttgcccaaaataacccgagagtcgccggcgttggcgacgaccatgaggtcctcctgtttgacgatggacagcggggtgcagccgctctggaccgcgtccaagcagcggctgcgccggagcttatcgtacacaacagcacatgcgaccacgtaggactgcttccagaggtcgaactggcagtcgtcaagcttcttctcgtcgccgatgagcgacaccaatgctcgcctcctactagtggtgtttgttcggagttttcaagtaagaaacatgtattcatctttggcgttggtttatgaaaatgactcacaagtgagatccatagaaaaaatattacggagaataaatgtcacacatgcaaaaaaggaatttaagttaaaatattattcaaacaaaagaaatcacatgcaaggctcttctttaaatactactcactgcatccaaaaatataattcaagaatctcggtgatacttatctactactacacattgtgcaagggtagcaggtgggcttcggaagagatgtagtagatgtgtttactgtaatagatgtagacataaacacacatgtggtgtagtggtaactacgagcacatttgcttaaggggtcgtgggttcaaatccccttggagccatttgtctttttaatttaattttagctaggcgtgggatgtacgtgggaatgggaatgggctttgcggggagggggaatgagaaatgcaggcagaatagggaatgggaatgtcaactgtgctgggagggggaatgggaaaggcagaatagggaatgggaatgtcaaatgtgctgggagggggaatggaaaggcagaacacggaatgacagcctaccccttactgccttaataagtagtagagactatagaattcattttagcatttactttttatgtttaaatttaaatagaaaatgatgaatataaacacgtatataaaacacatatatcaagtgttgtatgaatccactaattttctaaaacaaattttaattgggtatagaggaagtatttcatacttaaaaatattatatatcttaattttataagaaatattctgcattatatttgtatttcatatctttacttgtgatattaaaacaaataaactttctttgtgtaccgatacccatcgtctttacgtgatggtgccaccgtagaggactcagagtggcaaaggtcttcgagtgaaccgtaggcaaccgtagagttggttaggggtctaaatttggagtgaactcaaggtagaaaaggtgggttttactccaagtgaattggaggcaacccgagagtctaacttaagagcggactcgagctaaggaaggtcagtttaatggtttagaccaagccaccttctacatataggctcataggttcccttaagcatgtatctagtttcctcatcgagcttttgtttgtgattttcactcaagtcatactttaagggcttctttgtacctcaagcacattcagagtgtccctctagtccactcggagagcttgtgatgcaatcactcatcacaccaaggagccttgagacaccaccactagttcccttaagtatgtatctagttccttcatccaacttttgtttgtgattttcactctcaagtcatactctaagggcttctttcgacctcaagcacattcagagtgtccctctagtccactcggagagcttgtgatgcaatcactcatcacaccaaggagtcttgtcttgagacaccaccacgagttcccttaagcatacttttgtctgtgatttccactcaagtcatactctgagggcttctttatacctagagcacattcggagtgtccctctagtccactcggagagcttgtgttgcaatcactcgtcacaccaaggagccttgagacaccaccactagtataggcggttgtgaatctatttgtacaaggtgttgggctaagaaaaccgtcaagagaaatcgattccactggcggttctcagttacacgcctgcaaaataattatttctactggcccccaaccgctagtgaaaatcctttctaggaaacataaaaatgtgtttttaaaatagtaaaaatattttcattaggagagtcctctcgtaggccccgcctactagctctgtcaaaatcgcaagtcgtgacatttgtcgtgcaaaattcgcagctacgcaacccgtgggaatcaaacctcggacctcactctcgcatctaaccccctctacgactccatctatctcttacttcatgtctatattgcagttttgttgctcacatattagaacaatccaagtataaattaactatttgaggctataaacaaattcaaacgaaaaattgtatagtgtgtgatttcagaatttttgaatctaaattgtatacttaaacaagtttagggtatgatttaagagtttgtggatctaaatgccatacttacacgggtttagagttcgtggacataatggcataattaagctactttggagtgcctaatctctactaactattaagaacctactgtagactgcccccgcctccctacgcccgcccgcccgccctcccgcaatcccgcaaatcccgccgcggccgcagcagccgctgcgaaccacccgctcgccgacgcatgccgcacgcccacccaacgcgacccgtggaaccccgcagtcgcccccgaaccagcccgaccgcacgcccgtagccgcccccgaaccagcccgaagcgagaccggaggggcatgagcgccaccgccttgatcccgcccgctcctccccggatctcctcgccattgctgccgccattcctggattcgcgccctactcgcccagatccgaccgcaatagttaggctaagatcaacaatcattagcgccctactcgcccagattcgaccgcgatgcccagatccgaccgtgatagctaggctcggctgggacgtacgcatggaggtggaggaggagctgcctgatgatcttaccggtggctcaaagcaggcgaccaccacgacgctcttctacctcgcctaagatcacacagcttccgccacgtcgtctccaccgccggcggaggcgcctccgctgccgtgtgctgccaatagcgagaggggatccgaaataatcaaggcgaagatcatgtcccacccactctatccggctatcttgagagccttcatagactaccggaaggtatgcgtgcagcaggtttcctagagacatacaattctacagctaattttgccagagagcgaaagctagcatggcttcttgattttttaatgtgctagctccgtccttatatattattctccaatttttcatgagaagttctcttgtgtgtgtgattttttgttacttgaggtcagagcaccgccagagattgtcggccggctttccgccctcgctgatgacgtcgaaatgaattcagacgactgacaagaacaacgatgagcagcagacccagagctcaaccagttcatggtattacaacgtatatatctatatatatatatatatatcagtacgtgatgagtaactgattcatttctgggtttttagatcgtgtatatatctggctaagacaatggatccacatgtcgtgtgtgactgtgtgcgcgcgcaggagatcttcatagagtcattgatgctgaaatctcgtcgcgtgctactaaaatgatcatctctggtctgcatgccaggacggattggttccaaccaaggtagccttattgaagctttatacactgatgaatcagggaccatgtgtgtttctcctaaaccccgcttattatcagtacaaaaagaatatgatggtattcctttagataagccatcataaaaggagctatttgcggtagatgcatgcgagcaaaaccgagaatatagtgatttttaaaaagaaacagagtctttgacatacaaggacatctttgctagaaatattagggcctttcggtcgcgggatatctttaaggttggccaaggatccactttgtgtcttgtaccgggatatcttccaccatgtactatatgttctttcttgccactttgctcttcggtaaaatgtctccaatgtctcgagcatgctctaaaccttcgtagaagattgattttggtagtggaggcttaagacatgaaagaagagcagtttcgagaggccaatgaaggtggctccctgtgtaggaactgccttagatgaggagaaagatacacataagtatctacgagatcctaagctctcgccgcagcagcaacaaatcttaccaggattgtttaacccaattgattggatacggggagcggggggagaacctttaccaatagatcaacaattactcttttcctcaaataaccacttacgcacatcgtggtcaagcaatcaagtgcatttacaaggacagcctccatgtcatcacttagtgcctgttcaagatatggcgagaagatattcctcaacacttcttgctccaataaaatagcaaacatagacaatcggccaaagaaaaccgcacggagctgctcatcatgatcatttagaaatctttggaagtataggaaaaagaaaatcattactttgtttgtgcccaaagaagtaacacaaataacctatatcccgagaagagctctacgagtattaggtgtctcgcttttgtcccatcaccaaatcttgcactatctcataaatagatttcctcggtccgcaaagccggcgaaaaaaattatcttgcctcttcgttggtgaatctgcagattgggatctgtgagctaccactgattcatccagaggtctaaaattgtggtgagttcatctcctaattgtgcaatatttacaggatattgtagattgaaggcaaaccaaattcataccagtgaaattatgtttgaactaagtactataattggtcctcagtcctctatagctacgttaaaaaatgcagtcctatttaactaccaattctttgtgccgagtatttgtatgatatttttccacaaattgtcgttagatattacattttattggccactgtagctaatcccttttgatattttctatacaagatatatattagcaagtgttcagatcagaatgatagttttttccaagtaatacttctcattctttaatgataaaactaattaggactatcatggtttggcgccttggctagatgtagtgcccccaccttagatgccttgcatggatgctttggcaagatgtgccatgtgtgcttggaaaaccagaggtgcattgtctggtgcaacatctgtgtccaaaataaggtatgagcttttagcagtgctaaatgtttttattgaatttggaatttataggcctcatggtcattgccatgagctcgactctttctagttgttttttataattggacagagaatctttctgtatatttgactgttgggatggcattgacaagtatccccattcatccctctttctcatagtccatcgtcagcttcaacattgtatctcatccattttactccctggtccagccttagggataccaatagtcagatttatatatctttatgaccattctttcagcaacaagcaagtaatcaagcacctggtgaagagcgtgtcgctgtcgcagcggtactcgcgagggccgcaggtcttggcgtgtgccttgaggttggcattttgaagcctttgtgcatataaattgtatccatgaatctccttgtttttagtttgaaattgtactgagatatcatttcacacttttaagggtcaaactactaaggaagtatgtttggcagtaatgaataccgcctcttcgggctctggactatggagtggtgcatgcagctgggctcgggcacacgtacacccgatggagcctttcgtggccagcagcatccctggcaagagcgcaatcgcctcgacatatagtcccctgagagcacctagagggggggtgaataggtcatcctgtaaaaacttgaaacttaatgccacaaaacttgattaggagttagcacaataaagccaagtggctagagaggagttcttgcaaaacacaataaccacaaggagatcaacacagagaggcacaatggtttatcccgtggttcggccaagtccaacacttgcctactccacgttgtggcgtcccaacggacgagggttgcactcaacccctctcaagcggtccaaggacccacttgaataccatggtgttttgctttgtttcactatatcccgcttgcgaggaatctccacaacttggatcctctcgccttacaatttgatgttcacaaagaagcatggaagtaaagatgggaggagcaacgcacacaagacacaaaatcagagcacaaacacgcacacaagtcacaactcgagctcgtaacacaatccgaagagttctctactcaaatggagctctagttgctatcacaaagaatcaaatgtgcggaattggagtcttggtgcttagggatgctcaaggaatgcttggtgtgctcctccatgcgcctaggggtcccttttatagccccaaggcagctaggagccgttgagagcaatccaggaaggcaattcttgccttctatcgactggcgcaccggacagtccggtgcaccaccggacactgtccggtgcggatttctttcctattctggcgcagctgaccgttgaagtcttggagccgttggcgcaccggacactgtccggtgcacaccggatagtccggtgcccccttctgaccgttggctcggccacgcgtcacgcgcggatcgcgcggccgaccgttggctcggccgaccgttggctcaccgaacagtccgatgcaccactggacagtccggtgaattttagccgtacgccgccgacgaattcccgagagcggccttttcaccagagccagcctggcgcaccggacactgtccggtgcaccaccggacagtccggtgcaccccggtgacgagtcttggctgctcgagccaagtcttttccaattgtattttctctgattctagcacttagacaaatatgttagtacacaaaaaaaacaatgtactaagtctagaatcatacctttgtattgatttgcactttgtccaccatttggcatagtttaacacttgagtacttgtgttggacatgtaatcaccaaaatacttagaaatggcccaaggacacatttccctttcaatctccccctttttggtgatttatgccaacacaacaaaaagcaacacatagaagtgcaacatcaatgcaaataagaacaagaattgatttcgattcaaatttgccatatttggatcattctttgccaccacttggtttgtttttgcaaatcaaactcaatttcctatctctaagtcaacttcacttgtagagacataaagagaggtattccaagagaaattgatcaagaattcaaaaactccccctttttcccataatcaaacattcttcccacaagagatcaacttttgacaataagagacaacaagagtattttgacaaaccaaaagctctaattctattattttcaaaattctcaagtggtagctgatccatttcttgctttggccttattttctccccctttggcatcaagcaccaaaatgggatcaatcttggcccttgaacccctttgcctcaccaaaatcttcaactaagagtaaaaaggcaataagaatatgaagacgaacttggagtgagttaccctctcatcggagtgcagtggaagtcttgcatggtccaagttcacctttccctttcaatccacctttgagactaaatcaagtaaactcaagcacacaattagtctcaaagggtcaagttgtagcatgcctccccctaaataagtgcatcacttgcaaatggacttgtgaggtccggggatcatgagtacaacttgagcaccataaataaacaacaaaatgcataaggaacatgatcaaaggcataaacacatgtatgctacgaatcaatccaagttccgcgaatctaagacatttagctcactatgcagcctgcaaaaggtcttctcatctagaggcttggtaaagatatcggctagctggttctcggtgctaacataaaacacttcgatatctcccttttgctggtggtctctcaaaaagtgatgtcggatgtctatgtgctttgtgcggctatgctcaacaggattatccgccatgcggatagcactctcattatcacataggagtgggattttgctcagattgtagccaaagtcctggagagtttgcctcatccaaagtagttgcgcccaacactgtcctgcggcaacgtactcggcctcaccggtggatagggcaacagaagtttgtttcttagaactccatgacaccagggaccttcctaagaattggcacgtccccgatgtactcttcctatcgaacttacatccagcatagtcggagtctgaatatccaattaagtcaaaggtagacccctttggataccagatcccgaagcaaggcgtagcgactaaatatctaagaattcgctttacggccactaagtgacactcccttggatcggattgaaatctagcacacatgcatacgctaagcataatatccggtctactagcacataaataaagtaaagaccctaccatagaccggtatgccttttgatcaacggacttacctcctttgttgaggtcgacatgtccgtcagttcccatcggagtctttgcgggcttggcgtccttcatcccaaaccgcttgagcaagtcttgcgtatacttcgtttgagagatgaaggtgccatccttgagttgcttcacttagaacccaaggaagtagttcaactcgcccatcatcgacatctcgaatttctgcgtcatcaccctgctaaactcttcacaagacttttggttagtagaaccaaatattatgtcatcgacataaatttggcacacaaataagtcaccatcacatgtcttagtgaaaagagttggatcggccttcccaaccttgaaagcattagcaattaaaaagtctctaaggcattcataccatgctcttggggcttgcttaagtccatagagcgccttagagagcttacacgcgtggtcggggtaccgttcatcctcaaagccagggggttgctccacgtacacctcctccttgattggcccgttgaggaaagcgctcttcacatccatttggaacagcctgaaagaatggtgagcggcataggctaacaaaatgcgaatggactctagcctagctacaggagcaaaagtctcctcaaagtccaaacctgcgacttgggcataaccttttgccacaagtcgagccttgttccttgtcaccactccgtgctcgtcttgcttgttgcggaacacccacttggttcccacaacgttttgctttggacgtggcaccagtgttcaaacttcatttctcttgaagttattgagctcttcctgcatggccaacacccagtccggatctagcaaggcctcttctaccctaaaaggctcaatagaagagacaaaagagtaatgctcacagaaattagctaatctagagcgagtggttactcccttgctaatgtcacccaaaatctggtcgacgagatggttcctttgaatcattgctcgaacttgagttggaggggcctgtggtgcttcttcctcttcaacttggacatcctgtgctcccccttgatcacacgcctcctcttaaggttcttgttcatcatcttgagttggggggtgcaccgtcgttgaggaagaaggttgatcttgctccttgtgttcctgtggtcgcacgtctccaatcgccatggtacgaattgcgtccgttggaacatcatcctcatctacatcatcaagatcaacaacttgctctcttggagagccattattctcatcaaatacaacgtcgctagaggcttcaaccaaacccgatgatttgttgaagaccctatacgcctttgtatttgagtcataacctaacaaaaacccttctatagctttgggagcaaatttagaatttctacctttcttcaccagaatgtagcatttactcccaaaaactcgaaaatatgaaacattgggtttgttaccggttagtagttcgtatgacgtcttcttgaggaggcgataaaggtagacccggtttatgtcgtggcaagccgtgttcacagcttccgaccaaaaccgcttgggcgtcttgaattctccaagcatcgtccttgccatgtctataagtgtcctgttcttcctctctaccacaccgttttgctgtggtgtgtagggagcggagaactcgtgcttgattccttcctcctcaaggtactcctccacttgaaagttcttgaactcggacccgttgtcgctccttatcttcttcaaattgagttaaaactcattttgagctctccttaggaagcgcttgagggtcccttgggtttctgatttatcctgcaaaaagaatacccaagtgaagcgggaaaaatcatcaataataacaagaccatacttacttcccccgatgctaaggtaggcgacgggtccgaagaggtgcatatgcaatagctccagtggtcttgacgtggtcatcacatttttgctatgatgagtacttcccacctgtttacctgcttgacaagctgcacaaggtctatctttttcaaaagttacattagttagacctaacacatgttctccctttagaagtttgtgaaggttcttcatccccacatgtgctagacggctatgccacagccagcccatgcaagtcttagcaattaagcatgcatctagaccggcctcctcctttgcaaaatcaactaaataaagtttgttgtctagtacacccttaaaagctaatgaaccatcactccttctaaagacagatacatctacatttgtgaataagcagttgtatcccatattacataattgactaacggacaacaagttatacccgagcgattcaactaaaaacacattagagatggaatgctcggaagaaatagctattttccctagtcctttaaccttgccttgattcccgtcaccgaatatgattgagtcttgggaatctttgttcttgacgtaggaggtaaacatcttcttctcccccgtcatgtggtttgtgcatccgctgtcgataatccagcttgagcccccggatgcacaaacctgcaaggcaattaggcttgggttttaggtacccaactcttgttgggtcctacgaggttagtaacaatagccttagggacccaaatgcaagtcttgtctcccttgcatttggctcccacctttttagcaatcacctttttatttttacatgaaagaataaatttggcattgcaagcatgaaagacagtggtagatccattatgcacttttctaggagcatgagacatagagttcctcctagatctaccattaaaatgggaacttgaagcaaacatagcatgtgaatcacaagcattaaaactcctatcattatgaacatttctaccatgcatacaagaactagaagcagtcatagcatgtgaatcaaaagcatcataacttctatgaacattcctagaatatctcctatcatggtacatgaaagcatggttcttttgagcactattagccataggggccttccctttctccttggcggagatgggagccttatgacttgttaagttcttggcttccctcttgaagccaagtccatccttaattgaggggtgtctaccaatcgtgtaggcatcccttgcaaattttagtttatcaaattcacttttgctagtcttaagttgagcattaagactagccacttcatcctttaatttagaaatggaaacaaggtgttcactacaagcatcaacattaaaatctttacacctattgcaaatcacaacatgttctacacaagaggttgatttattagctatttctagtttagcattcaagtcatcattgatactctttaagctagaaatagattcatggcatgtagataattcatatgaaagcatttcatttcttttaacttctaacgcaacagaattttgtgcacttacaaatttatcatgctcttcatataaaagatcttcttgcttttctaaaagtctatttttctcattcaaagcatcaattaattcattgatcttatcaattttagttctatctaatcctttgaataaactagcatagtctacttcatcatcactagactcatcatcacttgaagaggcatatgtaatagcatttcgagtacttaccttcttctcctttgccatgaggcatgtgtgatgctcgttggggaagagagacgatttgttgaaggcagtggcggcgagtccttcgtcatcgtagtcggacgaagagcaatccgaatcccactccttgccgaggtgtgcctcgcctttagccttcttgtagaccttcttgttctctcttttcccattctttccttgttcctggtcactattattatcgggacagttagcaataaagtgaccaatcttaccacacttgaaacaggagcgctttcccttcgtcttgctctttttgggatgctctttgcgaccctttagcgccgtcttgaagcgcttgatgatgagggccatttcttcctcgttgagccccgccgcctcgacttgcgccacattgctaggtagtgcctccctgctacttgttgctttgagagcaacgggttgaggctcgtggattgggccattcaatgcctcatcaacgtatctcgcctccttgatcatcattcgcccgctcacgaatttcccaagtatttcttcgggcgtcatcttggtgtacctaggattctcacgaatcgagtttacaagatatggatcaaggacagtgaaagaccttagcattagtcggacgatgtcgtggtccgtccatcgcgtgcttccatagctccttattttgttgacgagggtcttgagcctattgtatgtttgggttagctcctccccctgatcatcgtgaaccttcctaattcgccttccaccaactccatcttggtgagcatggtgacgtcgtttccctcatgcgagatcttgaggctgtcccaaatctgcttggcgttatccaagccgctcaccttatggtattcatccctgcacaatgatgctaaaaggacagtagtagcttgtgcatttttgtgaatttgttcattaataaacatgggactatccgtactatcaaattgcattccactttctactatctcccatatacttggatggagagagaacaagtggctacacattttgtgactctaaaatccgtagtcctctccatcaaagtgaggaggtttaccaaggggaatggaaagcaaatgagcattggaactttgcggaatacgagagtaatcaaaagaaaagttcgagttaactgtcttctttttctcgtagtcgttgtcgtcgtcgtccttttgggaagaagatgacttgtcgctgtcgtcgtagtagacgatcttcttgatatgcctcttcttcttcccgtccttcttcttatgacttgagcctgagtcagtgggcttgtcgtcttttggctcattgatgaaggactccttctccttgtcgttgatcacaatcccctttcccttaggatccatcccttcgggcgattagtccctttcttgaagagaacggctctgatatcaattgagagcacctagaggggggtgaataggtgatcctgtaaaaacttgaaacttaatgccacaaaacttgattaggagttagcacaataaagccaagtggctagagaggagttcttgcaaaacacaataaccacaaggagatcaacacagagaggcatagtggtttatcccgtggttcggccaagtccaacacttgcctactccacgttgtggcgtcccaatagacgagggttgcactcaacccctctcaagtggtccaaggacccaattgaataccacggtgttttgctttgtttcattatatcccgcttgcgaggaatctccacaacttggagcctctcgcccttacaatttgatgttcacaaagaagcacggaagtaaggatgggatgagcaacgcacacaagacacaaaatcagagcacaaacacgcacacaagtcacaactcgagctcgcaacacaacccgaagagttctctactcaaatggagctctagtttctatcacaaagaatcaaatgcgcggaattagagtcttggtgcttagggatgctcaaggaatgcttggtgtgctcctccatgcgcctaggggtcccttttatagccccaaggcagctaggagccgttgagagcaatccaagaaggcaattcttgccttctgtcgactggcgcaccggacagtccggtgcaccatcggacactgttcggtgcggatttctttcctattctggcgcagctgaccgttgaagtcttggagccgttggcgcaccggacaccgttcgggtgcacaccgggacgatccggtgcccccttctgaccgttggctcggccacgcgtcacgcgcggattgcgcggccgaccgttggctcaccggacagtccggtgcaccaccggacagtccggtgaattttagtcgtacgccgccgacgaattcccgagagcggccttttcaccagagccagcctggcgcaccggacactgtccggtgcacccagactgaccagagtcttggctgctcgagccaagtcttttccaattgtattttctctgattctagcacttagacaaatatgttagtacacaaaaaaacaatgtactaagtctagaatcatacctttgtattgatttgcactttgtccaccatttggcatagtttaacacttgagtacttgtgttggacatgtaatcaccaaaatacttagaaatggcccaagggcacatttccctttcatcccccccatagaaacaagtggtagtattgatgtgttctctttcaatcttattgttctatcttcctggcctgtatttgaagcaacatatagtccccccacagaaacaagtggtagtgtcctctatttgttattgtcactttgttagtcacaagtcacataggtatacctagcagtggttgttagaaaaatatactatgcataatattttaggttgttttctgtaattgtagttagaatcttagatgaacctacaattaaaggtatacgtagctgtggatataggattgctgctgactcgtcttctaagcatggtgaagttgacgtatcacaggagcttgcatcaaccacattagaaatgaactatcaggggaatgatcatgattttgtacacacctttggtgtcgcatcgcctaataaagtgtccacaaacttgtgagacgtttttcggttccagctgcagatcccacagtaggacctatagttctagcaaataagtctaaatggtcaccagagcaggggcaacgcagaatcaggcgcccattctatgttgctgaagttgaagcacatgtgctcgcagtcgaaaagcatggaatgggaaggtatagtttcctatccccctcattcgacctaacagaattccttggtttctatattctcactaaagcaaaaatatatgtctttgcatatacttgtcaaatctgacagttagtttccttattgtcttttcctgatttattgattgatcctcttgatttccttcttttgctgaacctttttaattgatgcggaaggagtcttttgcacaagattgtatacttatgctttatgcaaaatcttgttatgcctcaacatcttggtggtatagcagatctctactacttattaaggctgcaagggtagcctgttatttcctgttctgtcattctcattccttgttctttcttttacattctccctctccgcacagcccacacactaccggaatcaatcgcttcgccgagtgcctgaagcactcggcgaagacataaaaacactcggcaaaggctttgccgagtgtaacactcggcaaagaaggctcggcgaacagtacatcggcaaagacttctttgcggagtactttttctcgggcactcggcaaagatgtttgccgagtgccagggagcactcggcaaagaaaagcgaccgttacggcaccgggtgacggagacggcggctttgccgagtgtcaacgctggcactcggcaaacaagatatctttgccgagtgtcttccgggcagcactcggcaaagccgccttctttgccgagtgccagttggaacactcggcaaagagcccgccagagagggtccccatgtcaggctctttgccgagtgttctgtgcggcactcggcaaagccgacctctttgccgagtgccagcgacataaaactcggcaaagaacctaagccggtgcccaggtctgtgctctttgccgagtgttatgaccctgacactcggcaaagagcctcttcgctaagtgtaacactcggcaaagtgaccagtatataccttttttatttgttttttgtattccatccacacaaacataagatatcacaaatatatcacatatatacatcacatatatcatcacagacataaatagccaacacaaacataaaaccgtcaccacaaacataaatatccatcacaaacataagtgttcaacacaagtatcaaacacaaacataagtctcaaacatcgcaaggtctcacataagtatcaaacacagacataagtattatagataagttctgaagtctaaaacaatgaaaacacaacacttcatggaggtgggcggtttgaccggggttgcgttgggctgaacccttccggagggttgtcggatgccgctccagattggccctgcacagagaagaaattgcatgtgttataccagatgcattacaaacatctaactacaattttgatactcacaggagtgtggaagagagcagggtcaactggagggaacaataaaggtggtggagcgatgccctgtgcggcgccaaggctctgcatgtactggaacatctccgccatcctctgatgatctgcccggcgctctgcctcccgctccgccatcatcctcgcttccatctcgtgacgttccctcctctcttcttcaagttgggtctgtaatattacaagccaacgttatagtaactcaaagactaggtatataactcaaggaaggacgagttacagaagcactaacctcgagttgctgtatgcgatgctgtgagttgtcgtgccgaggtcgaatggctgggctcgagcccgtgctccttgctctagacagagtgggagtggaggacgagtcgattgccccgtcggcaatccagtaccgcccatgtctcttgcctcctctgaccctcatgagcacatcggggtcgatcggctcggtgctcggatcatagtctgggccatggacctcctgcgccatggcggtgtagtcatggaggcggctgtagacggcggggttggtgtaggcctcgggcccatcatccgggttgtaggtgacgtcggacgtcgccttacccttatgggccatagcataggccgagaaggtggaacaaggccccgccaccatgtgacgccgagcgcaacgaaaaccaacgagatagttagaaataatatctaacttagtgctatatatctaaataaaaaaggtggcgtacccatgcttcggcatattggcccggagctccgctgccttggtggtgggaggggccttgcatcatcaaacgtcgttcccggctagctgtgtgtgcctcgtcccactcagccgaacaccacctatccaccatctgctcccagcatagaggatgtgcgacgcaccaatgtggaatcacctgcaaagtaaacacataaagtgcatatcagaagataaaataaaattcatgcattgagtactggtaccaaacatgcatgactttactcgcagaatcttgctccctggtcaacgacatggttcaggcttgaggtttggtcaccttctccccaaggacggagccgtggtaggtgatgatggcctggatgccggcctcatagtgcatgtccacaacgagcttcttacagctcatggtggccaccacatccgccctagcctcgtatccagcatcgcatctgaagaaatcctgcatacaaaaacgatgtatccatacattatttcaagaatttgcaacgaatgcgacatattttacattatactaagacttacccacagctcttgcttcacccgctccgccttgttattgaattccctaccatcccggtctactgcatcgggggcgacggcgtagtggtcgaaggtgaaggctgggcccgtcactccggcgtactccacaagtccagggaagtgttcctcgcacgacaggccgaggatgttgtttgggggcgacgatgacctccaagataatccaaaaccgtccaagacctgtccaagtgataaataaaaagtattagtttatattatgattttgaacacataatatgaacaagaatgaagaacataaagttacatacctctccccttccggccgaatcaacggttgtctgtcccgaagtatgggacgcggcgggagactcgcggggcctcgcaggtagatgctcctcgaactagagccgcctgaacctgaggcatcctgctgctggtcgtcgtcgtcctgctgctggtcgtcgtcgtcctgaggtgccgcctgctgctgcgctgcctgctctgcatcgtccgccgtcctactcctcctccccctcctcctcctcaagaaaccgcccaccatatttgtccaacaacctgcaattaagagtaaacaaataagcacatataaaaagatgtatttaaaaacaggtgcgaaataaaaagtcatatagcattacatcgattaaaaataatcttcatatgtgtcggggttagccggatcataactctcatcatcactatcaagcatttcaatctcaacaccatcggaagacgcaacctcatcattgccttcaaggattactaagtcattatcattttgcacctcatcatcctcctcatcaacaaccatttcaatatctacgtccattccgatagcttcagttaagtctatctcaaatcgcccttctagcccatcttcttggaagaactctccatcatatgtgtccgggtctaagttgtaatcttcatcgttaggaacaggtaacctcccgtgcggcgataccttatacacaacatcccaacccttaagatgttcttttgtttgacacgcatatgggagataatacacttgtgtggctgttgggccacgatatagacatcgtctccgctaaggtggaatcttgtcgaatttcgactatcccaagattagaatgtgtctcgtctcgtcacttgagggtcaaaccaatgacatttgaatatcacttcggagtaagaggtttggaaccataaaaattgagctcgtatatttcttcgattcgtccaaaataatcgacattgtcaaggcccggcgtaaagactccagaacacgttgttttccgattgggccgacttttgtcgtagtgtgttgtgcgaaaacggtatccattaacgtcatacccgaatatttcttgaccctataagcaaagccgttggctacttgtctcaactcggcactcatagacggatctctttggccctgcaagtattcgcaagttaaaagacgctaaattgagttcaaagacatatctcttttacaaactaagcacgtaccttacgtttgaaccaggaaatgaaatcgggcaacccatttctcgcaccctttctaagaagagcgtcatattccgtggagtgggatcccttgatcgacgcggaattcatgaagaaattgttccatgtatggcgtcacctcttcaaggttggtcaatacgtatagcatgatatgccgccactcttcatgtgtcaaggtcttggtggtcgagccacttgtgcttccgagttggcctcgaaatatgctaaggttcgattcattgtcgccatcattgtaacgaggggtggattatgcacgctcggcagtttgtcaccataataagttgttgtgaagtttgagacctcctcaagaatgtatgcctctgcaatggaagcctcgattttgcatttatttctacatttctttcgaatagtctttagacatctctcgattggatagcaccaacgtccctgcacggggccccccattcgtgcctcataggggagatgaagaatcaaatgctgcattggattgaagaagccgggtggaaatatcttctcaagcttacacagtaacacgggggccaatctttccaagtacgcaacaacggtccgagataactcttttgcacaaagttgacggaagaaatagctcaactcgaaagcgctagccgacatgctcggggacatagcctcgaaccatcgcgagaagaatccgttcaatccatatgtggaagtcatgactcttcatccctaagactcgcatagtagataagttcaccccctactcaggttagatgcatacccatcagggaacatcaacatcttgatccactgaagtacttccttcctttgggccctgcttaggacgaaatcggccttaggccttctccacgtctttccgccacttggcggcttcatctctagttttggtctatcacataacgccgcgcgatccactcttgccttcacattatcctttgacttatcgggaatgtccataattgttgcccatagtgcctcaggcaacattcttttcggtgtgcatcacgtcaatgttgtgtggaaggagcaggtcgtcataataggggagccgagtcaagccagacttatgtgtccacatatgctgctcaccatatcccacaaaaccaccttctgtattggccacgagcccatctatctgttgacgaatttcggcacaagtcatcattgcaggtgggcggtctgtcactacgacacctttcgtaaagttcttgatgtctaggcggaatggatggtcatcgggaagaaattgtcgatgtttatcgaaggacgaatatttgccaccctttttcaaccaaatgaacccgagagcttccttgcaaccgggcatgggaacttaccatgaacacaccgagcacagagaatagcccatacgccggtaagtcatgcatggagtactggtaccaaacatgcatcctgaagtttgtcttcgtagctcggtcatacgtccatacccttcctcccaggcacgtaccaattcatcgatcaaaggctccatgtacacgcccattttgttccccgggtgtccgggaattatcaacgacacgaatatattccgcctttgaaagcacacaccggggggagattgattggtataacaaacacgggccaacatgtgtacgggcggcgctcattccatagggattgaacccatctcgtggccaacacaacacgtacattacgagcctcttcggctttctcacggtgaatgtcatcaaagtgtttccatgcttcaccatctgatgcgtgcaccatcttgtcaggattgtatcgttttccatttttgtgccatgtcatctgtttcgcggattcctctgtcatgtaaagacgctggatcctcggtatgaacggaaggtgtcataggattgtcaaggggatgtcgagccgcctcttcgtccatcaccgagtctacctccataaacctagacgaattacacttgggacagtactttgcctccgcgtattctttcctaaatagcacgcaacccttcggacaagcatgaatctgctcatacgtcatcttgagtgcacgaagtagtttttgtgcctcgtacatgctctttggcataacgtgatcatccggaagcagactcccaataaccgtcaacaagccatcgaatgcatctctactcatgctgtactgcgacttgaacgccattacacgcccaatggcatccagttgagaaacctttgtctggccgtgaaggggttttcgtgccgcgtcgaacatgtcgtagaacgcctttgcgatcggctccggctcgtcatccatacatcctcccgtgtactgtgcctcctgatagtcgttcaacatatctgctacccccgcatctgcgtcataatcctcgacacgttgtctcaacacctcctctctcgtacgatgcgcttcaccatgaaatatccaccgagtatagcccggcgtaaatccattcttccaaatatgttctaccatgaccttctttggttttcttttccgattgtcacatttgtcgcacgggcatgggactagcttcgcccctttagcagcttcgccatatgcccgttccacgaaatcatcggtctttctaatccattcagtggtgacatcgttccttcctctacggcccgtgtacatccactcacggtcctccatcctataacatatttaaccaaagcctatcaacaaaaaaatccggcagcacctcccctgcacggggaggttttcaaagcctgtaaatataagtagcagcacgatggctgacatccacacatatacatatccacacatatacatatccacacatatacattaatgcctaaataaccacataaacataatttgtgcaattaaaagacacaatcaaaatgagtttgtacctagttgctcggcgtggacggtgcacgacggcgaacgggcgtgacggcgtggagggcgcgacgacgggcttgcgagggcgtggagggcacgacggcggcgaaccggatggcgaggggcgcgtcgagggcgcggcggcggcgaaccgggcggcgcgcggcggcggcgaaccggatgggcacggcgaggggcgcggcggcggccccggcacggcgagggcgagggcaagcggcgcggggcggcggcggccctggccgcggcaagggcgaggggcgcgggggcgcggcggcgcgggcggacggccccggcggcggtcccgcgcggcgagggcgatgacgaggagctcgggcgggcggcggtccccggcgcggcgacggcgagcgcgaggggcgcgggcgggcggcggtcccggcggcgaggagctcgggcggcgaggagctcgggcggcgaggagctcgggcgggcggcggcccccccgcggcgatggcgtggcgggcggcccggcacggcgagctcgagggcgggcgcgcgcggcggcgaaaacgggcagcgaggggcgcggcggcggcgacggtgagtgagagagtgagagtgaagtgaggaagaaaggttatctggcactcggcaaagattttttttaaattttaaagtacgctttgccgagtgccctagatgcggcactcggcaaaggtgcctttgccgagtgtcaaccgggagacactcggcaaagattctgtccttacgctttgccgagtgtcaccctgttgacactcggcaaagccctctttgccgagtgtcttctgttgacactcggcaaagtgtattttcattttttaaattttgtctcccaaactttttgtggtatgttcctacactatgtagacctacatgtaccatttgtagacaattataacatagtttccatagttagtagatttagttcgtttatttgaatttcttcggaaaattcaaatttgaactgcaggtcactcgaaacttggaaaaccgtgcatgaaaaaatgatattcatgttacttagcataagttacggcccgattgcgaagcgtaccggaaacttcgagcaacatgctcactaaacatggccgtgaacttggcatccacatgtttaaaaattgtataaaacacaaacaaagtcaggaaatcatgaaacttgtccacgtgtcatgatatcatatgtacaggctgtgataaaaattttagaatgtttggagaaagttgtgagacactatgtgtagaaaactagaggactacacatgaaatcaaagagtttcaatgtggatctcttaggtttctacacatagtgtctcacaactttctccaaacattctaaaatttttatcacaatctgtacatatgatatcatgacacgtggacaagtttcatgattttctgactttgtttgtgttttatacaatttttaaacatgtggatgccaagttcacggccatgtttagtgagcatgttgctcgaagtgtccggacgcttcgcaatcggccgtaacttatgctaagtaacatgaatatcattttttcatgcacggttttccaagtttcgagtgacctgcagttcaaatttgaattttccgaagaaattcaaataaatgaactaaatctactaactatggaaactatgttataattgtctacaaatggtacatgtaggtctacatagtgtaggaacataccacaaaaagtttgggagacaaaatttaaaaaatgaaaatacactttgtcgagtgtcaacaagtgacactcggcaaagaatgctttgccgagtgtctactatgtggcactcggcaaagaagcctctttgccgagtgccagccgttggctctcgacaaagactgacgaccgtcagctctggaacggccgctgacggccctttgccgagagccccctttaccgagtgtttgacactcggcaaaccattctttgccgagtgccgccctgtgccgagtgttcagcactcggtaaagaggcactttgccgagcgcctaactttaccgagtgcggcactcggcaaagccttctttgccgagtgcccgacaaaaggcactcggcaaagaagacaacactcggcaaagcctcggattccggtagtgacacctattttcccgttttcactcccctgcacagctcacatctagctaaaattaaaaaacacacgaccataagaggattcgaacccacgctccctcatgccaatgcgagaagtatctattgctacaccacatgtgtgtttctgtctacatctatgacaggaaaaacatttacaacatatctccccaagcccacctgctacccttgcacaatgcgcagtagtagataagtatcactgaaattcttgaattatatttttggatggagggagtagtatttaaagaagagccttgcatgcaatttcttttgtttgaataaagttttcaaattaaattcctttttctgcatgcgtggaatttattctgcataatatttttttatggatctaacttgtgagtcattttcataaaccaacaccaaggatgaatccatgtttgttacttggaaaccttgaacaaacaccactagcagaaggcgctcgcattggcatcgctcatcgacgatgagaagaagcttggcgactggcagttcgacctctggaagcagttctacgtggccgcatgcgccgctgtagacgacaagctccggcgcagccactgcttggacacggtccaaagcggctgcactgcgctgtccatcgtcaagtagggggacctcatggtcgtcgccaatgccggcgactcccgggttgttctggacaccgcatccgacgacggtgccatcacgtcatccaactcatcgtccacctgaagcccaacctgccacgtaagtcgctattgaccggccatgaattcttatgcgctaggacgacgtccgttgctgacgttgtgtgagtgtcctcgaacatgatgtatgcagaggggtagcacatccagtggtgcaacgaccaggtgtgctacctcgctgatgagtccgggtgcacttcgtttggcagcccagccaagagccatcgggactcgccatgtcgcgcgtgttcgatgactactatatcaaggactgtggcgtcatcttggcgccataggtgacgcggaggaggaccggcagcaatggccagttcatcatccttgtcgtagttagggtagcttttgtgctagcatgtctttaattctcttcacaaacacacacacttgtctttttgtttaagcaagcgcgtatggtggtgtgtgcctgatgactgacgatgtacgagggaacttcttccggcaggtgtgggacatactctccaacgacgagaccatgtaaatcgtggcatatattgaagtctgcatggtaccgatggttgcaatgtagtggtgaaacaactagattaataaaacaaatttatgtatggccaggatcataattggattatgaaactttttctcataatagtataacacacattttgtatataagttatcatggtaatatatattctcgttgcaatgcacggtcactcacctagtatacgatttaagagttaatggatctgtctagtaccacctcacaagtttgaaggccggccatgcatttgactcaaaaaaatagttatcattcatgctgtgatttgtttcatcactaaagtaagtttgatcatgacatatattttcatacatttgcataaatttgttgaacaagacaaataattaatgtttctagaaaaagtcaaccatgacgtatattaaaaaccaaagagaatatggggtgtttggcactgctctatatacactaccggaatccggctctttgccgagtgccttttgtcggacactcatcaaagacttctttgctgagggccacactcggcaaagaaacactctcggtaacgacaacctttaccgatgatagcacacttggcatagccaaacactcggtaaatggtgacgctccataaaggatcgttagcagtcgtttatagctgacgactgttatctttgccgagcgtcaggctctgacactcgacaaagataaaagtgtttgctatacatattagacttacatgttccatttttgtctacactgaagttctaagatttcatgtgtaactcgtctaggtttctaccatagtgtgtgacaactttttcgaaacattttcaaatttttattataggctctacatatgatatcatgatatgtcgacaagtttcataattttctgactttgtttgtgttttatacaatttttaaacaacttgatcgtaagttcacgaccatgtttcgtgagcatggtgctcgaaaatcccggtctgttcctgaaatagatcgtaacttgtgccaaataatatggatatcatttttgcattcaccgttttccatttttcgagtgactgcaagtgacttgctgttcaaatctgaattatccaaagaaatttaattaaacaaactaaatcaaatagttatagcaaacactttgataattatgccaaaattaaaacttgtaggtctatatactgtagaaaaacaccacaaaaaatatggtggaaaaaaagaaaaaatgcaaatattctttgctgagtgtcaaggaaagacactcgtcaaagtatattgtgtcgagtgccaataggtgggcactcgacacagtttttttttaaaaaattaaaataatctctgccgagtgccggcgatctagcgcttggcaaagtattctttgccgagtgtctaacctaggatactcggcaaagtgtatttaaaaattaaaaaaaaatctttgtcgagtgccagatcgcgtgcactcggcaaatatattgtacatatcaaaatccaacctcttttctgtcacacactctctctcacttctctcttctctctcacgccgcgccgctgccgcctctcacctagccgccgttgcccgagcgtgccgcttgcccaccctcgcgcagccgctcgcccgccctcgcaccttcaccggccgacctcatgccgccgtcgaccaccctcatgccgctggtcgccattcgccgtcgccggccggtgagcacataagtaataatatttgcatataattattgtttctagggagataagtacattggttaagagcctaatgcattagatttgtttaaggagtgtcattacaataggaaaaaggaatgctacatatctaccgcgctttatgagaagaaatgatgacatatctaataggagcagttctaatctcaagtacatacgcctgggccgagtgttacactcggcaaagagactctttgccaagtgtcaaggtcatagcactcggcacacctggacaccggtaaagtctctttgccgagtgttgtggccttggcactcggcaaagaagcaaactttaccgagtgtctcctagtgcactccgcaaaaggaactgacaaaggggtccgccagcgatctctttgccgagtgctagtccggcggccactcggcaaagagggagtctttgtcgagtgccacccaatacgctcggcaaaggacctagtaaaggagcccacagggagcttcttttgccgagtgtctgtacagtggacactcggcaaagagtgagcctttgccgattgtcactttgtgacactcggtacaggctccattgccgttacctgacgccgtgacgtcgacttttctttgccgagtagcgagtgatactcgacaaagactttgtcgagtgcccgataaaaagtacttggcaaagaaactattgccgatgtacagttcgctgagctttatttgccgagtgtcacactcgacaaagccttcgttgaatgttttccaggctttaccaaatgcttcagacacttggcaaagaagctgattctggtagtgataccaacttcgatcgcacgtgaaattgtagtttataatacaaatttaaataggtttaaaagttatttgtaatctatatgagaaataaaatgatttatctaagagttcgtaacttgaatttcacgattttctaaagcttttaaatagatttaaaaaatatttgtaatctatatgagaaataaaataatttatctaaaagttcgtaacttgaatttcaccattttcgaaagcttctaataatctgtttcaccaacttaactagattttgtgaagccccatcagcatagtggaccgcgaaatattcctcagcatctttccgtacccccttggcaccttggaccattgcggttgtagccctgcaacatatagcacatatctcaaaagccaaggtaaaggagaccctgttggtggtggtggtcgtcgtcggtgactcaggtgggatagattccctggtgtgtgtggtgggcgtgcaaattattgatcgctcacggtcccaaacacaatcatgcaaagagagatgtgatcctctccaagaaatgccatgcatgcccaccatctcactgctgctggcacacacatatatatcgtcgtcgatctgcaaccttagcttcaaccaaaggtacggtagtagtagtttccctgctgcaacagcttggcatggcgcccaagcttcctgtgctacgacaagcaaggtggctgccgctgctttttcttattaccaactttgttgtgctgcagttacaatgctcctatgggcttccgctccagaatgaaccgagacaagtaagctagctctgttttttcccctttccttgtgatcttggtttggtcaccttcatgcatcttggtactaccgccggcaaaatgccatgcttcagcacccccactcctccaaaaaagtaaaactacactaaagtaacggaagttattttcgacagtagcacggggcgactcggcatccgaccgtggcggcgcgtgcacgggaatcagagagagagggaagagaaagggagaacacaaccgtataaatgagttatttttcgacggctagagttacgagtgtcgaaaattatatctatttttagtggttagaggacagccgtcgaaaataatcaaagtcaccaaaaataataaaagctgccgaaaataacatattatttttaacggtagttctctgagcgccgaaaataactgtcactcttgttgtgctaataagatggaaagaaaaataccttttgattcttttattggttttgttactaattttacggtagtgggaatcgatgtgcgttggcggtctcttacctcaaatcaagcagtgggacgaaaaatacaaagtatactagactgtgagtattaaaaaacaaaaagaaaaatttattttaaaataaagaattcacaaccattatcggaatctagctccgagtgctttctatcaggcactcgacaaagtcctactcttggtaacgaccacgtttaccgaaagcaggactctcgacatagagaaacactcggcaaggaacgctttgccgagtgccgaacactcgacgaacagagacgatgtacagttcgccgagctttctttgccgaatgttgtcacactcggcaaagccttcgccgaatgttttacagacttcagacactcggcaaagaaattgtttcgggtagtgaatatgattacattatatcaattggtttctctattgtctaccacctgggaaacactttttcagctccattctgtgcaaaagttgaccaaagagctccatgaaatcattgtagcaggtttgaaccgattgttcaagtcacgagtacaataatatacatagccaaaggcacacccaatttagctttaatttataaaatcgcctgagtagtatggacgtggatagcaccagtttttctagtttgtagggaaaaatataaactaacagccaagaaattaattcatatgagcatcttttcgacgactatcttgagtagtttctagggactgacacttagctactattttttccatccaaccaggtaaaacgaagaatatatataccataaattatttgataaaatgaacctatgtccaagaagcaataaaatatgtggagttatttcttacatgattaacttaattactttcgatatgtttaactctaaaaattacttctatgtgtgattattagctaacttacgtgatggaaacatgcacataccgaacagatatacttccatgcatgtgtcacgtttttaagaaccataagtgttaggagtcgatagaaataattatttttacagacgagtaaattagaatcgctagtggaaatcgattttcactggtggttgatataataaaaccttcaataataatttttttaggattcataagcgaggttttaaaatcgcaaaaaaatattataattaagggaagcctcacccaagtttggtccattgaagttgaaagtcatggtatttttcgcgtgctacgtggtgggtgggaatcaaacttgcgaccttagcctcacacataccgtacgttaccactctactcatcaattacttcatgtttatatggtagttttgttgggcatatattataatcaactgtgtgtaaattgattatttcagtccgtaaagaaatttaaacaaaaaagttgttttgaagttcaataacttttattttagtacttttcacatctgaggtcgtttgcaaaatttctattttaaatttgaaaaatttagatacactttttgaaaacccaaaatgatttcaaataaaaaaacaattaactacaaagttttataacttttagagatctacaacttttatttcggtagtattccatataaggtcatttggaaataacaaaaaattcaggatataaatgatttgtagtagcagttacttagtaattcgtctataaaatcatggatttttagtaaaaatgatttttaaagacggttttcttaataaattaaaacactagtacaagcattactggcgtttaatatccgaaaccgccgtgtgagatacataaaaaatattatgcattccatggcggcagaatcaacaaattgcgtttacagcttgtctatactgacgaggggttgatggtgtgtgtgtgtgtttcagatatacatcgtctaccttggtgggcgacaaagtgacgatgctgatcttgtcactgcttcccaccatgacctccttgcgtctgttgtcggcaggtaattaactctatatacaaattgatataaacccaagttttaatgcatataaactacttgtctgtacgtgcattctgaagcaagcaagaagcggtagagtcgattatctacagctatagacatggattctccggcttcgctgctttgctcacgaaatcacagtctatacagattgcaggtactgataaatatatataaaaaaagatatatattttctacacatatcatcatgtttaatgttttctgctggcaggtctgcctggcgtggttagtgtaacgaaaaaccgagtccaccagacacgcacaactcgaagctgggactttgtggggctgcactacaacgatcagccaaacggtttgctcgcaaaggcggctaaatacggagacgacgtcattgtcggcgtcatcgactcaggcttctggccagagtcgcctagctacgctgaccacggctacggcccccctccttcgcgatggaagggagtctgccaaggcggcgacgacggctcgttcggcccgaataactgcaaccgcaaggtcataggggcgcggtggtacgctgccggcgtgagcgacgacaaggagaggctcaagggcgagtacatgtcccccagggacgccgaaggccacggaacccacacctcctccacggcggccggcaacgtcgtcggcaacgtcagcttccacgggctggcggccggcgcggcgcgaggcggcgcgcctcgcgccaggctcgctatttacaaggcctgctggggcgcgcccccgttgtcgggctcgtgcgacgacgccgatgtgatgaaggccatggacgatgccgtccacgatggcgttgacgtcctctcggtctctatcggcgggccctctgagacgccgggcacgttgcatgtcgtcgcgagtggggtcacggttgtctacgccgctgggaatgatgggcctgtcgcccagatggtggagaactcgtccccgtggctgttcaccgtcgccgcaacgactgtggataggatgttccccacagccatcaccctgggaaacaaccagattgtgcatggtacgtgcatacactagctagattctatgatgttatcttaggagtttgtccatatttgacaaccaattaacatcgcgcacaagtcgctgatgattttttttaaggtcaatccttatacgtggggacgcaagggagagaagatcatttccacgaggtcgtgcccatggtgaactcagggtatatatgattgattcgtacactaaccaatgtcaattattcaccaacgaattgttcatgtgttaaataaaactgagaataatatgtcaatgaatatttggcatacatataataatgagtattgaaacgtcggtgtatatacatacagttgtgatccagagtatgtaaacagcagcgatgtgaaggggaagattgtcttctgcatcacagaggacagcttgaatccatctgctacagttactgctgttggacagctagtgttggagaatggagggaaagggttcatattcacgggatataacagggacaatatcgttcggtgggaacctgttacaagcaaaatgataccgttcattttaatcgatcttgaggtcgcctaccacatcttgcagtactgcatgtacgtacgtaaacactgatcgattaacatatattacatcgatgctggttaattatatcacattttttatatttttttttatttcgatgcaccacaccactaaactaatcctctgaagcagctcaactgacggtaccccaagagcaaagatctctttggctcaaacaacttttggaactggggttcctgcccccaaggtagcagtgttctcgtctagaggacctagtgccgtctatccaggcgttcttaaggtaccctagctaccttctatatataattctctgtcttggcattcatcccatccatttcttctacaacaatcctcttcaaactaacattattgtttccatgcatacacatgaataatattcaacagcctgatatagctgcacctggggtgaacatcttagctgccgccccacaaattccttattacaaagagcagctgggtggcgtcctgtaccattttgagtctggaacatccatggctacccctcatgtgtctggtatcgtcgccctgcttaaatcattgcatcctgactggtcacctgcggccctcaaatcggcgctcatgacaactggtatgtgtattaaataatctcgccttgctagcttaaacaaccatgtccaatacaagcattgtcttaaacaacattgttattgtccccctgcatgcagcacttaccaccgacaacaacgggatcccgatacaagcagatggaaacccagtaaagatcgccgacgctttcgattacggagcagggtttgtcaacccaaccaaggctgacgatcccggtctcatatacgacatccaaccgtcagattacctcaggttcttcgactgcacgggagggttgggtaccaacgacagctgcacgacacctagggcatctgttgtagacctcaaccttccgtcgatcgcaatccctagtctcaaggcgccccaaaccgtcacgcgcaccgtcaccaacgttgggcgccagactaacgcagtgtacagagcagtcctccagccgcctccgggcgtggagatgtccgttgaaccgtcggtcttggtcttcgatgccaagaggaaagcacagagcttcaaggtggctttcatggcgacgcgtcggttccagggtgactacaccttcggtagcttggcatggcacgacggaggcagccactgggttcggatcccgattgcggtccgcatcgtaatccaggatttgtattcgaccgtctcttgaatcgatcccattgcggaaatcgtctagaaaaagaaataattaatgttatatgaagctagcgagtttccataaggaaccctcgctcgtggtggcaagatggtatttggtgcatatatatgaaaaatatatatccttaagtttgcttgagttatttatttgttttgatttctctaagatcttcgcttttgagattgatttcagtgatcgatgtctcagtacaacattatcgaattatagcaaactaggctctaaaatggttaacatgaaactataagatataccttgcaatatgttggacaggagactttgcagtagcaagtcagcaacctcagtcagggtgggggatggtaaattggtaagtcttctttgttctgggaaagtgcctggctaaggggtatgacacctagagacaccttccctttgacctactccatttctaacggcaaaaatagatccatccatgaggctctctcaaacaaccgatggattcaggacctacattttaatcacaatgatttttctgccgcgcacatacatgaatattgtcaattatggtgcgaggtaaatcagtttcgcttagtgcataataccccgaccttatcaagtggaagtttactatgagtggccagtacacaactcagtcagcctaccaagcgcagttctggggctccacatgcatgaattttaatagtataatttggagagcttgggcgtcaccaaagtgcaaattcttcagttggcttgctgttcaaaatagagtttggacagcagacaggttggcaagaaggggatggcctcataatccgcgttgtgtcctatgcgcctcatgcccagaatctggactacatctttttgttgaatgttgcttcaccagacatatttgggctgatttgaatctgtgggttgcaattacggagatccaccattcttcttggcaacctgtaggttcggtgcaccaatggtggtcaaatcttgcaacatccacagtcagaagcgtgaagggattgcaaactctcatcattctcgtgtcttggacagtttggtgtgagagaaactcgcgaatctttgagcacaaagagaagaccgtgacacagactataacgatgattaaggagcaaatccgcctgtggattctaggaggagcaaaacacttagcaaggctactgtaggttttagggaaggggagggggttggttttgggacatttgtgtcaccatacttaatgtctccttccctagtgtgatgtacttgtatattttagcccttgctggctttcatcttctttttaatataacaggcaattctcttgccagttttcaaaaaaaacgaaactataagatctggtcaatgtgcctacactaccgaaaatagcttctttgccgagtgtctgaagcctggaaaacactcgagaaggatttgccgagtgtgacactcgatgaaggctttgtcgactgtgacactcgacaaaaaaggctcggtgaactgtacatcggtaacggtttctttgtcgagtactttttatcgggctttgccgagtgccgctcggtactggacaaagaaatgttgccgttacggcgccaggtgacggcatcggagcctatgctcacaccaacgaaaacatctcatctcacaccatccctcatcaaccacaccttaacaccaccataactcatttgtaatccatatactccagtgcagttccaatacacagcctcaacaggaagtaggatgttacgcgcatcctagcggtccgaacctgtataaatccttgtgcaagcctgacgtgttcctgcacgtactatcgagtcacagtcaataacatcgtcctactcaaaagcatcacgtgggtaaccccatggtgtgcggacaataagtgataggtagagtggtattgtgggttacacgcgagggtgaggtcaagggtttgattccccttggtcgcgtgccacgtgattcttgcgcgaaaatgtcgcgaatattgcagggtggtggcttctctaattaaaatatttttttgctattttaaagcctattttatgttttctggaaaagtttttacctcgcagttttattaactcgatcgtgagtaaaaatcgatttccattgacggttttcttagcccaactggtagtgaaaatcgctttctattgacggttctcagttacccacctatacaaataattatttctactagcctctaccattgatggttctgaaaaacgcgagtacacataggttcacaactgactataaatcttctcgatactacactaccggaatccggccctttgctgagtgccggagtctttgccgagtgctttttatcgggcactcggcaaagaagactttgtcgagcgccacactcggcaaagtccgccgctcggtaaagagctcgtttaccgagagctggacactcggcacagcgaagcactcggcaaagactcctttgtcgagcatcaaacactcggcaaagactcctttaccgagcatcaaacactcggcaaagacggctctcggcaaaggtccgttagcggctgtctacagctgacgtccatcagtctttgccgagggccgccagccagcactcgacaaagcagattctttgtcgagtgccacatagctggcactcggcaaagagagtctttgtcgagtgttttctgtggacactcggcaaagcagatttgtattttttttattttggccaccaaactttttgtggtatgttcctacactatgtagacctacatgtaccattttggaacaattataaatgtgttttcaataactagtagatttagttcgtttatttggatttcttcggaaaattcagatttgaattgcaggtcactcgaaacttggaaaacagtgcatgaaaaaatgatatccatgctacttagcacaggttacgaccgatttcaggagcggaccggaaacttcgagcaccatgctcacttaacatgaccgtgaacttgccatccaggtgtttataaattgtataaaacacaaacaaagtcagaaaatcatgaaacctgtccacgtgtcatgatatcatatgtagaggctgtgataaaaatttaaaaaaaattcaaaaaagttgtgacgcactatgtgtacaaacctaagagatccacattgaaactccatgatttcatatgtagttctcttaggtttctacacatactgtctcacaactttctccaaacattctaaatttttttatcacagcctctacatatgatatcatgacacatggacaagtttcatgattttctgagtttgtttgtgttttataaaatttttaaacagctggatggcaagttcacgaccatgttgagtgagcatggtgctcaaagtttccggtccgctcctgaaatcggtcgtaacttgtgctaagtagcatgaatatcatttttgcatgcacggttttccaagtttcgagtgacctgcagttcaaatctgaattttctgaaaaaattcaaataaacgaactaaatctactagctattgaaaacacagttataattgttccaaaatggtacatgtaggtctacatagtgtaggaacacaccacaaaaattttggttggtaaaataaaaaaatacaaatgtattttgccgagtgtcagctggttgacactcggcaaagtaggctttaccgagtgttagctgggtggcactcagcaaagaatagtaaaagaatctttgctgagtgccacccagctgacactcggcaaagcgtactttgtcgagtgccagcgatctggcactcgacaaagcgtattttaaaattaaaaaaaatctttgctgagtgccagatcatggacattcggcaaagtacgtgtaaatacggctggtaaccttctttctctctcactctctcagtctcactccgcgccgcgattgatggaggcgaggataatggcggagcgggcggcgactgatcagaggatggcagatatgttccagtacatgcagagccttagcgcgtcacacggtttcgctctgccacctccattgttccctgcagttgatcctgctgtgttccatgctcctgtgagtatcaaaattgtagttagatgttggtaatacatctggtataacacatgcaatctcttatctatgcagggccaatctggagccgcatccaacaaccctcctgaagggttcagcccaatgcagcaccagaccaaccgcccacctccatgagttttatgttttcagtgttgaatacttatgtctgtgtgtttgaagacttcaaaacttgtgttagtcacttatgtttgtgttggatacttatgtcagagtttgagacgtatgagacttatgtttgtgttgggtacttgtgttgaacacttatgtttgtgatgaatatttatgtttgtgttggctatttatgtttgtgatgatatctgtgatgtatatatgtgatatatatgtgatatcttttgtttgtgtggatggaatacaaaaaacaaataaaaatggtgcagagtggtcactttgccgagtgttacactcggcaaagaggttctttgccgagtgtcaaagaggttctttgccgagtgtcaagaccatagcactcggcaaagaaccaagacctgggcaccggtataggttctttgccgagtgtaatggctctggcactcggcaaagaagcacgctttgccgagtgccataccaagtactcggcaaaggacctcacatgggtaccctctctggcggattctttgccgagtgtcccaggtggcactcggcaaaggtggattctttgtcgagtgctgctgggcagacactcgacaaaggtaactcctttgccgagtgtcagccgggacactcggcaaaggcgccgtctccgtcaatcgacgccgtaacggctgcttttctttgccgagtgttgtatggcactcgacaaacctctttgccgagtgcccgagaaaaagtactcggcaaagaaggctttgccgatgcactgtatgctgagtcttgtttgctgagtgtgacactcggcaaaggcagcgattccggtagtgctagtgatgtttagtcaccaaaatgacatcctctgtgaaataattggtggagtatgttaaggttaataatgcaatatgcttgcagttttagcagctgtttttcgtgtcaacgatcatcaccataggtaacatgcaagagctcaatggtttggaggacaccattacttggagatggtcggcagatgagcagtacagtgcaagcagtgcttacaacatccaattctcatccaattacagtacaatgaatctatgccctatttggaaggctaaggtggaaccgaggtgccgtttttttgcctggacattactacataagagaatcctaacggccgataaccttcttaaaaggggctggccttgcaacccaatatgctgtctctgtaactcggccccagaaacaattctacacttatgcaaggactgcccctttagtagagaggtgtggaacaaagtgttgtcctgggccaaccttcctttcttgaatgggattctcagcgacacatctttgtatgattggtggacgggtctgcgtagcctttgcaacaaacagtcaagaagatgcttcgacggcctgctaattcatttttggtggaatttatggctggaaagaaataacagaattttccaaagtcagcatagaagcgttaatcaagtggcccttgcagtcatcggatattgctagtagctgaggtcttgttggtctggactagtgggtttttgttctactctttttattttttctttcttatcctcttccctccggttgctttggttttgtattatccatttctttcctctctaatctaatatatatcggagcggcaagtcttttgccccttcctttaaaaaaaattatttacaaattgttttccagaggttaatgaccaccgtaccggggcgcagttggaatccgtcactattttccgctgttgtcatcatgaagtgctaattcataaagttgcgtaatgttacttcatatgtttaatttaatatgtcctcagactaatatgaaatcatttagacaagaaaaaaaacttcttactctggtttttaatttaataaagccattgatatgacttgtatttgttttattgaaaacctttatgtaaagatacaaagttgtacgcggtgcttaataatttttaaataaagtaagccacaacaaaatagatgatttatctaagaagttaacaatagttttaaaatggagttagtatttactctgtcgaaagcaatggctggttataattttgtaatctcatcaagtgttggtcagtatatacctgtcatggttgtctatgtgtccgggtacacgtatcaacatccagaagcagcttaaatttcttttacaaagtccggtgaaagaactagaatcagaagtggaaaattgagctggcccacattttggttatcgtgtcagttgtgtcgtcaaagtgcaccttgggcaaccaacaagcgctctctcttactctcatattcttatatataaatatgtatatgtatccctccctgagcaacgtcgatatgtgaagaaccattctatactaaagcaacgcattatcgcgataccgatcgaggagaagagaacgtaaggtaggcgacatcatgtcgttcggtcgccgttcatggcaaatcctcgccctatccatgcccatggtgctcctctccttcgtcgctgccacggccgtgtccaagcggaccggcgagctaacggtgttctggggccggaacaaggaggagggcactctgcgagaggcttgcgacacagggctgtacaacacggtcatcatctccttctacagcgtcctcggccgtggaagctacggggtagacctctcaggccatccgctggacggcgtcggcaccgacatcaagcgctgccagtccaagggaatcccggtcttcctctccatcggcagcggcggcggaggcaacggctactccctctcgtcctccgagtcggcggtagccgtcgcggacaacctctggaacgcgtacctcggcggcggccgcagcgacgtgccccgcccattcggcgacaccgtggtcgacggcatcgatttctacatcgacaaccaccagggtgcccccgacgacctctacgacgagcttgccagacgcctcgacggctacaacagccaagccagcgtgaggaagcgggtgaggctgacggcgacgccgcggtgcgcgttgccgcaagggcgcctggagacggcgatgcagacgggattgttcgagcgcatccacgtccgcttctacggcgacgacgagtgcacccacagcaacggtgccgtcgacaagcactgggacaagtgggcggcgaggtaccccggcagccagctgtacgtggggctcgccgcggcggagagcggcgtgccagaaggcgcggcgccacccgtcgaggtctacctcaaatacctctactacagtctgctgcccaaggtgcagtcggcgcccaactatggtggcatcatggtctgggacaggttcagtgacaagaaaaccagctacagcagcgctgtcaagggctgggcgtcatgcagctattctgggtgtgtttaattatttgacagcttttgcacgaatctatatcctaaaagat

SEQ ID NO: 273 - DNA, 101 bp, Artificial Sequence
  MA_NC262A_v2.contig81_29678271_A_G_SNP
gcaaccttgggagctagctagccatggagttcgcaactggagcgctaggcrcccttcttctcaagctctccatgctgcttcatggtgagtacaacctggag

SEQ ID NO: 274 - DNA, 101 bp, Artificial Sequence
  MA_NC262A_v2.contig81_29678261_T_C_SNP
gagctagctagccatggagttcgcaactggagcgctaggcacccttcttcycaagctctccatgctgcttcatggtgagtacaacctggagaagggcgtca

SEQ ID NO: 275 - DNA, 101 bp, Artificial Sequence
  MA_NC262A_v2.contig81_29678186_A_G_SNP
tgagtacaacctggagaagggcgtcaggggggacatccagcgcgtcatgarcaagctcgagcgggttcattctgtcctcggccatgttgtcgaagtgcctg

SEQ ID NO: 276 - DNA, 101 bp, Artificial Sequence
  MA_NC262A_v2.contig81_29678166_T_G_SNP
gcgtcaggggggacatccagcgcgtcatgaacaagctcgagcgggttcatkctgtcctcggccatgttgtcgaagtgcctgtgccactgaagccacgtcct

SEQ ID NO: 277 - DNA, 101 bp, Artificial Sequence
  MA_NC262A_v2.contig81_29678162_T_C_SNP
caggggggacatccagcgcgtcatgaacaagctcgagcgggttcattctgycctcggccatgttgtcgaagtgcctgtgccactgaagccacgtcctgatc

SEQ ID NO: 278 - DNA, 101 bp, Artificial Sequence
  MA_NC262A_v2.contig81_29678157_G_C_SNP
gggacatccagcgcgtcatgaacaagctcgagcgggttcattctgtcctcsgccatgttgtcgaagtgcctgtgccactgaagccacgtcctgatctggtc

SEQ ID NO: 279 - DNA, 101 bp, Artificial Sequence
  MA_NC262A_v2.contig81_29678147_T_G_SNP
gcgcgtcatgaacaagctcgagcgggttcattctgtcctcggccatgttgkcgaagtgcctgtgccactgaagccacgtcctgatctggtcagaatgttgg

SEQ ID NO: 280 - DNA, 101 bp, Artificial Sequence
  MA_NC262A_v2.contig81_29678127_A_G_SNP
agcgggttcattctgtcctcggccatgttgtcgaagtgcctgtgccactgragccacgtcctgatctggtcagaatgttggcacgcagcgtcagggagcta

SEQ ID NO: 281 - DNA, 102 bp, Artificial Sequence
  MA_NC262A_v2.contig81_29678123_CA_AG_Substitution
ggttcattctgtcctcggccatgttgtcgaagtgcctgtgccactgaagccacgtcctgatctggtcagaatgttggcacgcagcgtcagggagctatccta

SEQ ID NO: 282 - DNA, 102 bp, Artificial Sequence
  MA_NC262A_v2.contig81_29678123_CA_AG_Substitution
ggttcattctgtcctcggccatgttgtcgaagtgcctgtgccactgaagcagcgtcctgatctggtcagaatgttggcacgcagcgtcagggagctatccta

SEQ ID NO: 283 - DNA, 100 bp, Artificial Sequence
  MA_NC262A_v2.contig81_29678121_-_ATCATT_Deletion
ttcattctgtcctcggccatgttgtcgaagtgcctgtgccactgaagccacgtcctgatctggtcagaatgttggcacgcagcgtcagggagctatccta

SEQ ID NO: 284 - DNA, 106 bp, Artificial Sequence
  MA_NC262A_v2.contig81_29678121_-_ATCATT_Deletion
ttcattctgtcctcggccatgttgtcgaagtgcctgtgccactgaagccaatcattcgtcctgatctggtcagaatgttggcacgcagcgtcagggagctatccta

SEQ ID NO: 285 - DNA, 101 bp, Artificial Sequence
  MA_NC262A_v2.contig81_29678114_A_G_SNP
tgtcctcggccatgttgtcgaagtgcctgtgccactgaagccacgtcctgrtctggtcagaatgttggcacgcagcgtcagggagctatcctacgacatgg

SEQ ID NO: 286 - DNA, 103 bp, Artificial Sequence
  MA_NC262A_v2.contig81_29678112_CTG_ATA_Substitution
tcctcggccatgttgtcgaagtgcctgtgccactgaagccacgtcctgatctggtcagaatgttggcacgcagcgtcagggagctatcctacgacatggagga

SEQ ID NO: 287 - DNA, 103 bp, Artificial Sequence
  MA_NC262A_v2.contig81_29678112_CTG_ATA_Substitution
tcctcggccatgttgtcgaagtgcctgtgccactgaagccacgtcctgatatagtcagaatgttggcacgcagcgtcagggagctatcctacgacatggagga

SEQ ID NO: 288 - DNA, 102 bp, Artificial Sequence
  MA_NC262A_v2.contig81_29678105_GA_AT_Substitution
ccatgttgtcgaagtgcctgtgccactgaagccacgtcctgatctggtcagaatgttggcacgcagcgtcagggagctatcctacgacatggaggacttcgt

SEQ ID NO: 289 - DNA, 102 bp, Artificial Sequence
  MA_NC262A_v2.contig81_29678105_GA_AT_Substitution
ccatgttgtcgaagtgcctgtgccactgaagccacgtcctgatctggtcaatatgttggcacgcagcgtcagggagctatcctacgacatggaggacttcgt

SEQ ID NO: 290 - DNA, 101 bp, Artificial Sequence
  MA_NC262A_v2.contig81_29678099_T_G_SNP
tgtcgaagtgcctgtgccactgaagccacgtcctgatctggtcagaatgtkggcacgcagcgtcagggagctatcctacgacatggaggacttcgtcgaca

SEQ ID NO: 291 - DNA, 102 bp, Artificial Sequence
  MA_NC262A_v2.contig81_29678091_AG_GA_Substitution
tgcctgtgccactgaagccacgtcctgatctggtcagaatgttggcacgcagcgtcagggagctatcctacgacatggaggacttcgtcgacaccttcctgg

SEQ ID NO: 292 - DNA, 102 bp, Artificial Sequence
  MA_NC262A_v2.contig81_29678091_AG_GA_Substitution
tgcctgtgccactgaagccacgtcctgatctggtcagaatgttggcacgcgacgtcagggagctatcctacgacatggaggacttcgtcgacaccttcctgg

SEQ ID NO: 293 - DNA, 101 bp, Artificial Sequence
  MA_NC262A_v2.contig81_29678085_A_G_SNP
tgccactgaagccacgtcctgatctggtcagaatgttggcacgcagcgtcrgggagctatcctacgacatggaggacttcgtcgacaccttcctggtgcgt

SEQ ID NO: 294 - DNA, 106 bp, Artificial Sequence
  MA_NC262A_v2.contig81_29678002_CGCCAA_-_Insertion
gacaccttcctggtgcgtgtccaaggccctgaacgcaccagcaaaagaagcgccaaaatattcatgaataagacatatatggtcgtgaatcgccatgagatcgccc

SEQ ID NO: 295 - DNA, 100 bp, Artificial Sequence
  MA_NC262A_v2.contig81_29678002_CGCCAA_-_Insertion
gacaccttcctggtgcgtgtccaaggccctgaacgcaccagcaaaagaagaatattcatgaataagacatatatggtcgtgaatcgccatgagatcgccc

SEQ ID NO: 296 - DNA, 101 bp, Artificial Sequence
  MA_NC262A_v2.contig81_29677995_A_T_SNP
tcctggtgcgtgtccaaggccctgaacgcaccagcaaaagaagcgccaaawtattcatgaataagacatatatggtcgtgaatcgccatgagatcgcccag

SEQ ID NO: 297 - DNA, 101 bp, Artificial Sequence
  MA_NC262A_v2.contig81_29677987_G_T_SNP
cgtgtccaaggccctgaacgcaccagcaaaagaagcgccaaaatattcatkaataagacatatatggtcgtgaatcgccatgagatcgcccagaccatcaa

SEQ ID NO: 298 - DNA, 101 bp, Artificial Sequence
  MA_NC262A_v2.contig81_29677984_T_G_SNP
gtccaaggccctgaacgcaccagcaaaagaagcgccaaaatattcatgaakaagacatatatggtcgtgaatcgccatgagatcgcccagaccatcaagga

SEQ ID NO: 299 - DNA, 101 bp, Artificial Sequence
  MA_NC262A_v2.contig81_29677982_A_T_SNP
ccaaggccctgaacgcaccagcaaaagaagcgccaaaatattcatgaatawgacatatatggtcgtgaatcgccatgagatcgcccagaccatcaaggact

SEQ ID NO: 300 - DNA, 101 bp, Artificial Sequence
  MA_NC262A_v2.contig81_29677979_C_T_SNP
aggccctgaacgcaccagcaaaagaagcgccaaaatattcatgaataagayatatatggtcgtgaatcgccatgagatcgcccagaccatcaaggacttcg

SEQ ID NO: 301 - DNA, 101 bp, Artificial Sequence
  MA_NC262A_v2.contig81_29677977_T_G_SNP
gccctgaacgcaccagcaaaagaagcgccaaaatattcatgaataagacakatatggtcgtgaatcgccatgagatcgcccagaccatcaaggacttcgaa

SEQ ID NO: 302 - DNA, 101 bp, Artificial Sequence
  MA_NC262A_v2.contig81_29677968_G_A_SNP
gcaccagcaaaagaagcgccaaaatattcatgaataagacatatatggtcrtgaatcgccatgagatcgcccagaccatcaaggacttcgaagagcgcgtc

SEQ ID NO: 303 - DNA, 100 bp, Artificial Sequence
  MA_NC262A_v2.contig81_29677965_-_AAT_Deletion
ccagcaaaagaagcgccaaaatattcatgaataagacatatatggtcgtgaatcgccatgagatcgcccagaccatcaaggacttcgaagagcgcgtcca

SEQ ID NO: 304 - DNA, 103 bp, Artificial Sequence
  MA_NC262A_v2.contig81_29677965_-_AAT_Deletion
ccagcaaaagaagcgccaaaatattcatgaataagacatatatggtcgtgaataatcgccatgagatcgcccagaccatcaaggacttcgaagagcgcgtcca

SEQ ID NO: 305 - DNA, 100 bp, Artificial Sequence
  MA_NC262A_v2.contig81_29677958_-_ATG_Deletion
aagaagcgccaaaatattcatgaataagacatatatggtcgtgaatcgccatgagatcgcccagaccatcaaggacttcgaagagcgcgtccagcagata

SEQ ID NO: 306 - DNA, 103 bp, Artificial Sequence
  MA_NC262A_v2.contig81_29677958_-_ATG_Deletion
aagaagcgccaaaatattcatgaataagacatatatggtcgtgaatcgccatgatgagatcgcccagaccatcaaggacttcgaagagcgcgtccagcagata

SEQ ID NO: 307 - DNA, 102 bp, Artificial Sequence
  MA_NC262A_v2.contig81_26677946_AG_CA_Substitution
tgtttggctctctccacaaggacatagaggaagatgctttacggcgtatcaggcagctgctgccgataggtgtggctgagggaccatagagctcttcgagca

SEQ ID NO: 308 - DNA, 102 bp, Artificial Sequence
  MA_NC262A_v2.contig81_26677946_AG_CA_Substitution
tgtttggctctctccacaaggacatagaggaagatgctttacggcgtatccagcagctgctgccgataggtgtggctgagggaccatagagctcttcgagca

SEQ ID NO: 309 - DNA, 102 bp, Artificial Sequence
  MA_NC262A_v2.contig81_29677944_AC_GA_Substitution
tattcatgaataagacatatatggtcgtgaatcgccatgagatcgcccagaccatcaaggacttcgaagagcgcgtccagcagatagatgagcgtcgtcaaa

SEQ ID NO: 310 - DNA, 102 bp, Artificial Sequence
  MA_NC262A_v2.contig81_29677944_AC_GA_Substitution
tattcatgaataagacatatatggtcgtgaatcgccatgagatcgcccaggacatcaaggacttcgaagagcgcgtccagcagatagatgagcgtcgtcaaa

SEQ ID NO: 311 - DNA, 101 bp, Artificial Sequence
  MA_NC262A_v2.contig81_29677935_G_C_SNP
ataagacatatatggtcgtgaatcgccatgagatcgcccagaccatcaagsacttcgaagagcgcgtccagcagatagatgagcgtcgtcaaaggtcattg

SEQ ID NO: 312 - DNA, 101 bp, Artificial Sequence
  MA_NC262A_v2.contig81_29677926_G_A_SNP
atatggtcgtgaatcgccatgagatcgcccagaccatcaaggacttcgaaragcgcgtccagcagatagatgagcgtcgtcaaaggtcattgaaacactta

SEQ ID NO: 313 - DNA, 101 bp, Artificial Sequence
  MA_NC262A_v2.contig81_29677914_C_G_SNP
atcgccatgagatcgcccagaccatcaaggacttcgaagagcgcgtccagsagatagatgagcgtcgtcaaaggtcattgaaacacttaatttccactttg

SEQ ID NO: 314 - DNA, 101 bp, Artificial Sequence
  MA_NC262A_v2.contig81_29677909_A_G_SNP
catgagatcgcccagaccatcaaggacttcgaagagcgcgtccagcagatrgatgagcgtcgtcaaaggtcattgaaacacttaatttccactttggcttg

SEQ ID NO: 315 - DNA, 101 bp, Artificial Sequence
  MA_NC262A_v2.contig81_29677903_G_T_SNP
atcgcccagaccatcaaggacttcgaagagcgcgtccagcagatagatgakcgtcgtcaaaggtcattgaaacacttaatttccactttggcttgcgtgca

SEQ ID NO: 316 - DNA, 101 bp, Artificial Sequence
  MA_NC262A_v2.contig81_29677788_A_G_SNP
tttactgtctttcttccattttatttccttttctggttctaacaggtacgrtgttgatgctatggttccccgtgtcaaaaccttggttgatcctcgcatat

SEQ ID NO: 317 - DNA, 101 bp, Artificial Sequence
  MA_NC262A_v2.contig81_29677782_A_G_SNP
gtctttcttccattttatttccttttctggttctaacaggtacgatgttgrtgctatggttccccgtgtcaaaaccttggttgatcctcgcatatttgctc

SEQ ID NO: 318 - DNA, 101 bp, Artificial Sequence
  MA_NC262A_v2.contig81_29677780_G_A_SNP
ctttcttccattttatttccttttctggttctaacaggtacgatgttgatrctatggttccccgtgtcaaaaccttggttgatcctcgcatatttgctctg

SEQ ID NO: 319 - DNA, 101 bp, Artificial Sequence
  MA_NC262A_v2.contig81_29677775_G_T_SNP
ttccattttatttccttttctggttctaacaggtacgatgttgatgctatkgttccccgtgtcaaaaccttggttgatcctcgcatatttgctctgaagta

SEQ ID NO: 320 - DNA, 101 bp, Artificial Sequence
  MA_NC262A_v2.contig81_29677769_C_T_SNP
tttatttccttttctggttctaacaggtacgatgttgatgctatggttccycgtgtcaaaaccttggttgatcctcgcatatttgctctgaagtacaccaa

SEQ ID NO: 321 - DNA, 103 bp, Artificial Sequence
  MA_NC262A_v2.contig81_29677768_CGT_ACC_Substitution
ttatttccttttctggttctaacaggtacgatgttgatgctatggttccccgtgtcaaaaccttggttgatcctcgcatatttgctctgaagtacaccaaggc

SEQ ID NO: 322 - DNA, 103 bp, Artificial Sequence
  MA_NC262A_v2.contig81_29677768_CGT_ACC_Substitution
ttatttccttttctggttctaacaggtacgatgttgatgctatggttcccaccgtcaaaaccttggttgatcctcgcatatttgctctgaagtacaccaaggc

SEQ ID NO: 323 - DNA, 101 bp, Artificial Sequence
  MA_NC262A_v2.contig81_29677753_G_T_SNP
gttctaacaggtacgatgttgatgctatggttccccgtgtcaaaaccttgkttgatcctcgcatatttgctctgaagtacaccaaggccacggaccttgtc

SEQ ID NO: 324 - DNA, 101 bp, Artificial Sequence
  MA_NC262A_v2.contig81_29677750_G_T_SNP
ctaacaggtacgatgttgatgctatggttccccgtgtcaaaaccttggttkatcctcgcatatttgctctgaagtacaccaaggccacggaccttgtcggc

SEQ ID NO: 325 - DNA, 101 bp, Artificial Sequence
  MA_NC262A_v2.contig81_29677738_T_A_SNP
atgttgatgctatggttccccgtgtcaaaaccttggttgatcctcgcatawttgctctgaagtacaccaaggccacggaccttgtcggcatggatgaggca

SEQ ID NO: 326 - DNA, 101 bp, Artificial Sequence
  MA_NC262A_v2.contig81_29677727_G_C_SNP
atggttccccgtgtcaaaaccttggttgatcctcgcatatttgctctgaastacaccaaggccacggaccttgtcggcatggatgaggcaagggaggaact

SEQ ID NO: 327 - DNA, 101 bp, Artificial Sequence
  MA_NC262A_v2.contig81_29677697_G_C_SNP
cctcgcatatttgctctgaagtacaccaaggccacggaccttgtcggcatsgatgaggcaagggaggaactaatcacaaggttgaccaaggaagatgacac

SEQ ID NO: 328 - DNA, 101 bp, Artificial Sequence
  MA_NC262A_v2.contig81_29677629_G_A_SNP
actaatcacaaggttgaccaaggaagatgacacctccactgaacaaaggcragtctctatcgttggttttggaggacttggcaagacagcgcttgcaaaag

SEQ ID NO: 329 - DNA, 101 bp, Artificial Sequence
  MA_NC262A_v2.contig81_29677570_G_A_SNP
tcgttggttttggaggacttggcaagacagcgcttgcaaaagcagtttatracaaacttaaagctaaaggggaattccattgcgcggcctttgtgtcggtg

SEQ ID NO: 330 - DNA, 101 bp, Artificial Sequence
  MA_NC262A_v2.contig81_29677538_C_T_SNP
cttgcaaaagcagtttatgacaaacttaaagctaaaggggaattccattgygcggcctttgtgtcggtgtctcggtttcctcagctcgaaaaattcttcaa

SEQ ID NO: 331 - DNA, 101 bp, Artificial Sequence
  MA_NC262A_v2.contig81_29677522_G_A_SNP
atgacaaacttaaagctaaaggggaattccattgcgcggcctttgtgtcgrtgtctcggtttcctcagctcgaaaaattcttcaaggaattgctttatgag

SEQ ID NO: 332 - DNA, 101 bp, Artificial Sequence
  MA_NC262A_v2.contig81_29677512_T_A_SNP
taaagctaaaggggaattccattgcgcggcctttgtgtcggtgtctcggtwtcctcagctcgaaaaattcttcaaggaattgctttatgagcttgacgaga

SEQ ID NO: 333 - DNA, 101 bp, Artificial Sequence
  MA_NC262A_v2.contig81_29677507_C_A_SNP
ctaaaggggaattccattgcgcggcctttgtgtcggtgtctcggtttcctmagctcgaaaaattcttcaaggaattgctttatgagcttgacgagactgag

SEQ ID NO: 334 - DNA, 101 bp, Artificial Sequence
  MA_NC262A_v2.contig81_29677500_A_T_SNP
ggaattccattgcgcggcctttgtgtcggtgtctcggtttcctcagctcgwaaaattcttcaaggaattgctttatgagcttgacgagactgagtacaagg

SEQ ID NO: 335 - DNA, 101 bp, Artificial Sequence
  MA_NC262A_v2.contig81_29677498_A_G_SNP
aattccattgcgcggcctttgtgtcggtgtctcggtttcctcagctcgaaraattcttcaaggaattgctttatgagcttgacgagactgagtacaaggaa

SEQ ID NO: 336 - DNA, 101 bp, Artificial Sequence
  MA_NC262A_v2.contig81_29677495_T_A_SNP
tccattgcgcggcctttgtgtcggtgtctcggtttcctcagctcgaaaaawtcttcaaggaattgctttatgagcttgacgagactgagtacaaggaactt

SEQ ID NO: 337 - DNA, 101 bp, Artificial Sequence
  MA_NC262A_v2.contig81_29677465_G_A_SNP
ggtttcctcagctcgaaaaattcttcaaggaattgctttatgagcttgacragactgagtacaaggaacttattgacatcagcaccccattggaacttatg

SEQ ID NO: 338 - DNA, 101 bp, Artificial Sequence
  MA_NC262A_v2.contig81_29677448_A_C_SNP
aaattcttcaaggaattgctttatgagcttgacgagactgagtacaaggamcttattgacatcagcaccccattggaacttatgaatctagtgcatgaatt

SEQ ID NO: 339 - DNA, 101 bp, Artificial Sequence
  MA_NC262A_v2.contig81_29677447_C_G_SNP
aattcttcaaggaattgctttatgagcttgacgagactgagtacaaggaasttattgacatcagcaccccattggaacttatgaatctagtgcatgaattc

SEQ ID NO: 340 - DNA, 106 bp, Artificial Sequence
  MA_NC262A_v2.contig81_29677441_GACATC_-_Insertion
tcaaggaattgctttatgagcttgacgagactgagtacaaggaacttattgacatcagcaccccattggaacttatgaatctagtgcatgaattccttcataataa

SEQ ID NO: 341 - DNA, 100 bp, Artificial Sequence
  MA_NC262A_v2.contig81_29677441_GACATC_-_Insertion
tcaaggaattgctttatgagcttgacgagactgagtacaaggaacttattagcaccccattggaacttatgaatctagtgcatgaattccttcataataa

SEQ ID NO: 342 - DNA, 101 bp, Artificial Sequence
  MA_NC262A_v2.contig81_29677426_T_A_SNP
atgagcttgacgagactgagtacaaggaacttattgacatcagcaccccawtggaacttatgaatctagtgcatgaattccttcataataagaggtacacg

SEQ ID NO: 343 - DNA, 100 bp, Artificial Sequence
  MA_NC262A_v2.contig81_29677423_-_GAAATAGAT_Deletion
agcttgacgagactgagtacaaggaacttattgacatcagcaccccattggaacttatgaatctagtgcatgaattccttcataataagaggtacacgcg

SEQ ID NO: 344 - DNA, 109 bp, Artificial Sequence
  MA_NC262A_v2.contig81_29677423_-_GAAATAGAT_Deletion
agcttgacgagactgagtacaaggaacttattgacatcagcaccccattggaaatagatgaacttatgaatctagtgcatgaattccttcataataagaggtacacgcg

SEQ ID NO: 345 - DNA, 101 bp, Artificial Sequence
  MA_NC262A_v2.contig81_29677415_G_A_SNP
gagactgagtacaaggaacttattgacatcagcaccccattggaacttatraatctagtgcatgaattccttcataataagaggtacacgcgtacatgtac

SEQ ID NO: 346 - DNA, 101 bp, Artificial Sequence
  MA_NC262A_v2.contig81_29677403_T_C_SNP
aaggaacttattgacatcagcaccccattggaacttatgaatctagtgcaygaattccttcataataagaggtacacgcgtacatgtaccacacctagtgt

SEQ ID NO: 347 - DNA, 101 bp, Artificial Sequence
  MA_NC262A_v2.contig81_29677393_C_A_SNP
ttgacatcagcaccccattggaacttatgaatctagtgcatgaattccttmataataagaggtacacgcgtacatgtaccacacctagtgtgcattatatg

SEQ ID NO: 348 - DNA, 101 bp, Artificial Sequence
  MA_NC262A_v2.contig81_29677388_T_A_SNP
atcagcaccccattggaacttatgaatctagtgcatgaattccttcataawaagaggtacacgcgtacatgtaccacacctagtgtgcattatatgttcat

SEQ ID NO: 349 - DNA, 101 bp, Artificial Sequence
  MA_NC262A_v2.contig81_29677178_A_G_SNP
ccttattgctgtcgatgacatatgggatactgacgcatgggcaatgatacratgggcttttcctgagaataagctaggaagcagaataatcgcaactactc

SEQ ID NO: 350 - DNA, 102 bp, Artificial Sequence
  MA_NC262A_v2.contig81_29677175_GG_AC_Substitution
tattgctgtcgatgacatatgggatactgacgcatgggcaatgatacaatgggcttttcctgagaataagctaggaagcagaataatcgcaactactcgcag

SEQ ID NO: 351 - DNA, 102 bp, Artificial Sequence
  MA_NC262A_v2.contig81_29677175_GG_AC_Substitution
tattgctgtcgatgacatatgggatactgacgcatgggcaatgatacaatacgcttttcctgagaataagctaggaagcagaataatcgcaactactcgcag

SEQ ID NO: 352 - DNA, 101 bp, Artificial Sequence
  MA_NC262A_v2.contig81_29677057_T_G_SNP
tatgtaggtggttgctatatgatgaaacctcttactcgagagaaatcaaakatattattctatggacgaatatttggctctgaaggtaaatgtcctcctga

SEQ ID NO: 353 - DNA, 101 bp, Artificial Sequence
  MA_NC262A_v2.contig81_29676941_C_T_SNP
tgagaaaatattgaataaatgcggaggcgtgccattggctattattactayatctagcttgctggctagtaagtcaagaaacataaaagaatggtacaatg

SEQ ID NO: 354 - DNA, 101 bp, Artificial Sequence
  MA_NC262A_v2.contig81_29676870_A_G_SNP
agtcaagaaacataaaagaatggtacaatgttgctgattctattggttccrgaatactaaaaaacagtactgaaatggagaatttgaggaacatactgctg

SEQ ID NO: 355 - DNA, 101 bp, Artificial Sequence
  MA_NC262A_v2.contig81_29676861_A_G_SNP
acataaaagaatggtacaatgttgctgattctattggttccagaatactaraaaacagtactgaaatggagaatttgaggaacatactgctgcttagctat

SEQ ID NO: 356 - DNA, 102 bp, Artificial Sequence
  MA_NC262A_v2.contig81_29676857_AC_GA_Substitution
aaaagaatggtacaatgttgctgattctattggttccagaatactaaaaaacagtactgaaatggagaatttgaggaacatactgctgcttagctattatga

SEQ ID NO: 357 - DNA, 102 bp, Artificial Sequence
  MA_NC262A_v2.contig81_29676857_AC_GA_Substitution
aaaagaatggtacaatgttgctgattctattggttccagaatactaaaaagaagtactgaaatggagaatttgaggaacatactgctgcttagctattatga

SEQ ID NO: 358 - DNA, 101 bp, Artificial Sequence
  MA_NC262A_v2.contig81_29676852_A_G_SNP
aatggtacaatgttgctgattctattggttccagaatactaaaaaacagtrctgaaatggagaatttgaggaacatactgctgcttagctattatgatcta

SEQ ID NO: 359 - DNA, 101 bp, Artificial Sequence
  MA_NC262A_v2.contig81_29676839_A_T_SNP
tgctgattctattggttccagaatactaaaaaacagtactgaaatggagawtttgaggaacatactgctgcttagctattatgatctaccagcacgattaa

SEQ ID NO: 360 - DNA, 101 bp, Artificial Sequence
  MA_NC262A_v2.contig81_29676837_T_A_SNP
ctgattctattggttccagaatactaaaaaacagtactgaaatggagaatwtgaggaacatactgctgcttagctattatgatctaccagcacgattaaag

SEQ ID NO: 361 - DNA, 101 bp, Artificial Sequence
  MA_NC262A_v2.contig81_29676834_A_T_SNP
attctattggttccagaatactaaaaaacagtactgaaatggagaatttgwggaacatactgctgcttagctattatgatctaccagcacgattaaagaca

SEQ ID NO: 362 - DNA, 101 bp, Artificial Sequence
  MA_NC262A_v2.contig81_29676829_C_G_SNP
attggttccagaatactaaaaaacagtactgaaatggagaatttgaggaasatactgctgcttagctattatgatctaccagcacgattaaagacatgttt

SEQ ID NO: 363 - DNA, 101 bp, Artificial Sequence
  MA_NC262A_v2.contig81_29676818_T_G_SNP
aatactaaaaaacagtactgaaatggagaatttgaggaacatactgctgcktagctattatgatctaccagcacgattaaagacatgtttgttatatctga

SEQ ID NO: 364 - DNA, 101 bp, Artificial Sequence
  MA_NC262A_v2.contig81_29676809_A_C_SNP
aaacagtactgaaatggagaatttgaggaacatactgctgcttagctattmtgatctaccagcacgattaaagacatgtttgttatatctgagtattttcc

SEQ ID NO: 365 - DNA, 101 bp, Artificial Sequence
  MA_NC262A_v2.contig81_29676664_C_G_SNP
atagctgaaggttttttcaatggagaactagcacatgatgggctctttaascttggcgaatcttgtttccacgagctcataagaagaagcatggtgcagcc

SEQ ID NO: 366 - DNA, 101 bp, Artificial Sequence
  MA_NC262A_v2.contig81_29676663_C_A_SNP
tagctgaaggttttttcaatggagaactagcacatgatgggctctttaacmttggcgaatcttgtttccacgagctcataagaagaagcatggtgcagcca

SEQ ID NO: 367 - DNA, 101 bp, Artificial Sequence
  MA_NC262A_v2.contig81_29676658_C_G_SNP
gaaggttttttcaatggagaactagcacatgatgggctctttaaccttggsgaatcttgtttccacgagctcataagaagaagcatggtgcagccagtaac

SEQ ID NO: 368 - DNA, 101 bp, Artificial Sequence
  MA_NC262A_v2.contig81_29676631_A_G_SNP
catgatgggctctttaaccttggcgaatcttgtttccacgagctcataagragaagcatggtgcagccagtaacacttgaaggcacgggtcttgtatatgc

SEQ ID NO: 369 - DNA, 101 bp, Artificial Sequence
  MA_NC262A_v2.contig81_29676542_A_C_SNP
tcttgtatatgcttgtcgtgttcataatatgtttcatgatttgatcctctmcatgtcacacgaagaagaatttgtttctgcagtcaatgaaaagtttggtc

SEQ ID NO: 370 - DNA, 101 bp, Artificial Sequence
  MA_NC262A_v2.contig81_29676532_C_T_SNP
gcttgtcgtgttcataatatgtttcatgatttgatcctctacatgtcacaygaagaagaatttgtttctgcagtcaatgaaaagtttggtcttctagatgt

SEQ ID NO: 371 - DNA, 101 bp, Artificial Sequence
  MA_NC262A_v2.contig81_29676525_G_C_SNP
gtgttcataatatgtttcatgatttgatcctctacatgtcacacgaagaasaatttgtttctgcagtcaatgaaaagtttggtcttctagatgttcgttct

SEQ ID NO: 372 - DNA, 101 bp, Artificial Sequence
  MA_NC262A_v2.contig81_29676499_G_A_SNP
atcctctacatgtcacacgaagaagaatttgtttctgcagtcaatgaaaartttggtcttctagatgttcgttctcggcggttagcattccagaacataac

SEQ ID NO: 373 - DNA, 101 bp, Artificial Sequence
  MA_NC262A_v2.contig81_29676491_T_C_SNP
catgtcacacgaagaagaatttgtttctgcagtcaatgaaaagtttggtcytctagatgttcgttctcggcggttagcattccagaacataacaaaagagc

SEQ ID NO: 374 - DNA, 101 bp, Artificial Sequence
  MA_NC262A_v2.contig81_29676487_A_T_SNP
tcacacgaagaagaatttgtttctgcagtcaatgaaaagtttggtcttctwgatgttcgttctcggcggttagcattccagaacataacaaaagagcagta

SEQ ID NO: 375 - DNA, 101 bp, Artificial Sequence
  MA_NC262A_v2.contig81_29676479_G_T_SNP
agaagaatttgtttctgcagtcaatgaaaagtttggtcttctagatgttckttctcggcggttagcattccagaacataacaaaagagcagtacagacttg

SEQ ID NO: 376 - DNA, 101 bp, Artificial Sequence
  MA_NC262A_v2.contig81_29676449_C_A_SNP
gtttggtcttctagatgttcgttctcggcggttagcattccagaacataamaaaagagcagtacagacttgtggaacatccacggctggcacaattgaggt

SEQ ID NO: 377 - DNA, 103 bp, Artificial Sequence
  MA_NC262A_v2.contig81_29676444_GAG_AGT_Substitution
gtcttctagatgttcgttctcggcggttagcattccagaacataacaaaagagcagtacagacttgtggaacatccacggctggcacaattgaggtcacttaa

SEQ ID NO: 378 - DNA, 103 bp, Artificial Sequence
  MA_NC262A_v2.contig81_29676444_GAG_AGT_Substitution
gtcttctagatgttcgttctcggcggttagcattccagaacataacaaaaagtcagtacagacttgtggaacatccacggctggcacaattgaggtcacttaa

SEQ ID NO: 379 - DNA, 101 bp, Artificial Sequence
  MA_NC262A_v2.contig81_29676404_T_C_SNP
cataacaaaagagcagtacagacttgtggaacatccacggctggcacaatygaggtcacttaatgccattggatgtcctatatacgcgatacctccaattg

SEQ ID NO: 380 - DNA, 101 bp, Artificial Sequence
  MA_NC262A_v2.contig81_29676341_T_C_SNP
tgccattggatgtcctatatacgcgatacctccaattgaaagctataaatyattgcgtgtactggatttcgaaaattgtgcaggtattgaaggccatgatc

SEQ ID NO: 381 - DNA, 101 bp, Artificial Sequence
  MA_NC262A_v2.contig81_29676299_G_A_SNP
ctataaattattgcgtgtactggatttcgaaaattgtgcaggtattgaagrccatgatcttgttcatcttgggaaattgcatcacctcaagttccttgggc

SEQ ID NO: 382 - DNA, 101 bp, Artificial Sequence
  MA_NC262A_v2.contig81_29676118_T_C_SNP
ggtgtggaagaattacctcaagccttgcataatcttacagaattgatgtgyctaattgctgactggagaacgagagtgcccaattggattggtaacctcac

SEQ ID NO: 383 - DNA, 101 bp, Artificial Sequence
  MA_NC262A_v2.contig81_29675740_T_A_SNP
ttgcgctggttggagttctcaaggctgcctctttggattaatcctggacawcttcctaacctctaccacttatggctgatggtatctgaggcggaagaacg

SEQ ID NO: 384 - DNA, 101 bp, Artificial Sequence
  MA_NC262A_v2.contig81_29675701_G_T_SNP
aatcctggacatcttcctaacctctaccacttatggctgatggtatctgakgcggaagaacgggatctggaaatccttggggggtttccagtgcttcactc

SEQ ID NO: 385 - DNA, 101 bp, Artificial Sequence
  MA_NC262A_v2.contig81_29675692_A_G_SNP
catcttcctaacctctaccacttatggctgatggtatctgaggcggaagarcgggatctggaaatccttggggggtttccagtgcttcactccctccactt

SEQ ID NO: 386 - DNA, 101 bp, Artificial Sequence
  MA_NC262A_v2.contig81_29675616_G_C_SNP
ttccagtgcttcactccctccacttgttgattgtgaatactgaacgtgaasatgtcatgacttgtggctgtggtggattcaagaatttgaaatgctgcagt

SEQ ID NO: 387 - DNA, 101 bp, Artificial Sequence
  MA_NC262A_v2.contig81_29672873_T_C_SNP
cagcgcatttgacatattgccaagttggtttggctcactttctagtatctycacgttaacaatcgaggtctacaagttgtcacaggacataattgatacgc

SEQ ID NO: 388 - DNA, 101 bp, Artificial Sequence
  MA_NC262A_v2.contig81_29672774_A_T_SNP
gctcggaaggctgcctggtcttggttctctatccctgacatcgaaacaagwaccaaaaggatactttgtgatcggctctgacaggttcagtaagctagaga

SEQ ID NO: 389 - DNA, 101 bp, Artificial Sequence
  MA_NC262A_v2.contig81_29672735_G_A_SNP
atcgaaacaagaaccaaaaggatactttgtgatcggctctgacaggttcartaagctagagagcttaaagtttgtgagcaatgcaatggtagagatgtttc

SEQ ID NO: 390 - DNA, 101 bp, Artificial Sequence
  MA_NC262A_v2.contig81_29672727_G_C_SNP
aagaaccaaaaggatactttgtgatcggctctgacaggttcagtaagctasagagcttaaagtttgtgagcaatgcaatggtagagatgtttccacgtcaa

SEQ ID NO: 391 - DNA, 101 bp, Artificial Sequence
  MA_NC262A_v2.contig81_29672644_C_T_SNP
gagatgtttccacgtcaacaatcaaatggcacggaacagctcaaaaggctyatgattgtgttccatgcttcacgtacacaagatgtgaacaaagatttctg

SEQ ID NO: 392 - DNA, 101 bp, Artificial Sequence
  MA_NC262A_v2.contig81_29671383_A_G_SNP
cctcacttctttaccgaaccaggaaagtgcagatgttgttggctccgatartattgtggaagttcataataaagtgatagagttaccactagtgaatgaaa

SEQ ID NO: 393 - DNA, 124 bp, Artificial Sequence
  MA_NC262A_v2.contig81_29671373_AGTTCATAATAAAGTGATAGAGTT_-_Inserti on
ttaccgaaccaggaaagtgcagatgttgttggctccgataatattgtggaagttcataataaagtgatagagttaccactagtgaatgaaatgaacttgcagacgattaagagggatcaatact

SEQ ID NO: 394 - DNA, 100 bp, Artificial Sequence
  MA_NC262A_v2.contig81_29671373_AGTTCATAATAAAGTGATAGAGTT_-_Inserti on
ttaccgaaccaggaaagtgcagatgttgttggctccgataatattgtggaaccactagtgaatgaaatgaacttgcagacgattaagagggatcaatact

SEQ ID NO: 395 - DNA, 101 bp, Artificial Sequence
  MA_NC262A_v2.contig81_29671326_T_C_SNP
ggaagttcataataaagtgatagagttaccactagtgaatgaaatgaactygcagacgattaagagggatcaatactataatttcagtgaagatgaggact

SEQ ID NO: 396 - DNA, 101 bp, Artificial Sequence
  MA_NC262A_v2.contig81_29671319_G_A_SNP
cataataaagtgatagagttaccactagtgaatgaaatgaacttgcagacrattaagagggatcaatactataatttcagtgaagatgaggacttaatgtt

SEQ ID NO: 397 - DNA, 101 bp, Artificial Sequence
  MA_NC262A_v2.contig81_29671302_A_C_SNP
gttaccactagtgaatgaaatgaacttgcagacgattaagagggatcaatmctataatttcagtgaagatgaggacttaatgttggtttctagctacctta

SEQ ID NO: 398 - DNA, 103 bp, Artificial Sequence
  MA_NC262A_v2.contig81_29671300_TAT_ACG_Substitution
taccactagtgaatgaaatgaacttgcagacgattaagagggatcaatactataatttcagtgaagatgaggacttaatgttggtttctagctaccttaatgt

SEQ ID NO: 399 - DNA, 103 bp, Artificial Sequence
  MA_NC262A_v2.contig81_29671300_TAT_ACG_Substitution
taccactagtgaatgaaatgaacttgcagacgattaagagggatcaatacacgaatttcagtgaagatgaggacttaatgttggtttctagctaccttaatgt

SEQ ID NO: 400 - DNA, 101 bp, Artificial Sequence
  MA_NC262A_v2.contig81_29671055_C_A_SNP
gaagtgaatatctttcaaggttactatgatgccatagaaaggaaaaatcamagtggccagacaagtgatgacaaggtgaatcatacattttgtaccattat

SEQ ID NO: 401 - DNA, 101 bp, Artificial Sequence
  MA_NC262A_v2.contig81_29670736_T_C_SNP
caacatttatagaccacaggggaggaaagctgagaaggaaaaggctcgtgygagaaagcatggtggatctgatgttgatggtgatccgttcattgaagaag

SEQ ID NO: 402 - DNA, 101 bp, Artificial Sequence
  MA_NC262A_v2.contig81_29670693_T_C_SNP
gctcgtgtgagaaagcatggtggatctgatgttgatggtgatccgttcatygaagaagtaaaaaatatgagggaagcacgggaagaaacagaacgagaccg

SEQ ID NO: 403 - DNA, 101 bp, Artificial Sequence
  MA_NC262A_v2.contig81_29809276_T_C_SNP
tagacatggattctccggcttcgctgctttgctcacgaaatcacagtctayacagattgcaggtactgataaatatatataaaaaaagatatatattttct

SEQ ID NO: 404 - DNA, 101 bp, Artificial Sequence
  MA_NC262A_v2.contig81_29809278_C_A_SNP
gacatggattctccggcttcgctgctttgctcacgaaatcacagtctatamagattgcaggtactgataaatatatataaaaaaagatatatattttctac

SEQ ID NO: 405 - DNA, 101 bp, Artificial Sequence
  MA_NC262A_v2.contig81_29809631_T_C_SNP
cgatggaagggagtctgccaaggcggcgacgacggctcgttcggcccgaayaactgcaaccgcaaggtcataggggcgcggtggtacgctgccggcgtgag

SEQ ID NO: 406 - DNA, 14 bp, Artificial Sequence
  primer
gtaccatgtgacca

SEQ ID NO: 407 - DNA, 13 bp, Artificial Sequence
  primer
gtagtgttttgac

SEQ ID NO: 408 - DNA, 13 bp, Artificial Sequence
  primer
tgatctcaaagat

SEQ ID NO: 409 - DNA, 13 bp, Artificial Sequence
  primer
gttatgtgcacaa

SEQ ID NO: 410 - DNA, 13 bp, Artificial Sequence
  primer
agatgaaggctgt

SEQ ID NO: 411 - DNA, 13 bp, Artificial Sequence
  primer
aagtgacatgcag

SEQ ID NO: 412 - DNA, 14 bp, Artificial Sequence
  primer
catctgatgaaagc

SEQ ID NO: 413 - DNA, 14 bp, Artificial Sequence
  primer
aattatgctgatga

SEQ ID NO: 414 - DNA, 24 bp, Artificial Sequence
  insertion
agttcataataaagtgatagagtt

SEQ ID NO: 415 - DNA, 197 bp, Artificial Sequence
  marker Affx-90199961
  misc_feature (101)..(101): n is a, c, g, or t
  misc_feature (152)..(152): n is a, c, g, or t
acacataccaccttgctctcttcacgagctgaaatgcacaaccgaacaacgttttcccgcccatttttttttttgttcttccagcagcgtcttaccaaccntataactgcagatgtgtacaggcgcgcatactgacagagagcgtagaatgntacagcagtgtggtcctttgtcgattttatattaatttgtatgac

SEQ ID NO: 416 - DNA, 201 bp, Artificial Sequence
  marker PZE-106073551
  misc_feature (101)..(101): n is a, c, g, or t
ctattacctccaccaaaagggacgatacatggctctctgtccacccgtcgtcatgtttgccctatgctcatggctcacctacgtgctcatcaagaactacnaccgctctcttaatatcaccgtattcataacggtcgtcttggcattcctggagttataccagctctacttgtacatagcctctggttggttcaaggtggc

SEQ ID NO: 417 - DNA, 101 bp, Artificial Sequence; identical to SEQ ID NO: 51
  marker PZE-104115065

What is claimed is:

1. A process of identifying a maize plant that displays enhanced resistance to anthracnose stalk rot, the process comprising detecting in the maize plant
a. the presence of at least two markers at a resistance locus on chromosome 6 comprising a “G” at C16759-001-K1 and one of the following single nucleotide polymorphisms:
a “C” at C12305-001-K1,
a “C” at C12307-001-K1,
a “G” at C16760-001-K1,
an “A” at C12314-001-K1; and/or
b. the presence of at least one marker at a resistance locus on chromosome 6 comprising
at least one of the variant nucleotide polymorphisms recited in Table 13,
wherein the at least two markers of (a) and/or the at least one marker of (b) are closely linked to and associated with the resistance locus on chromosome 6.

2. The process of claim 1, wherein the resistance locus on chromosome 6 is located on a chromosomal interval between makers PZE-106066805 and PZE-106075546.

3. The process of claim 1, wherein the resistance locus on chromosome 6 is located on a chromosomal interval between 139646631 and 139889078 numbered according to the B73AGPv05 genome sequence.

4. The process of claim 1, wherein the resistance locus of chromosome 6 comprises SEQ ID NO: 272, or a fragment thereof.

5. The process of claim 1, wherein the resistance locus on chromosome 6 comprises one or more nucleotide sequences selected from the group consisting of
ix. a nucleotide sequence of SEQ ID NO: 266 or 269,
x. a nucleotide sequence having a coding sequence of SEQ ID NO: 267 or 270,
xi. a nucleotide sequence which is complementary to a sequence from i. or ii.,
xii. a nucleotide sequence which has at least 80% identity with a sequence from i., ii. or iii.,
xiii. a nucleotide sequence which differs from a nucleic acid sequence according to i., ii. or iii. depending on the degeneracy of the genetic code,
xiv. a nucleotide sequence which hybridizes with a nucleic acid sequence according to i., ii. or iii. under stringent conditions,
xv. a nucleotide sequence which encodes for a protein comprising the sequence of SEQ ID NO: 268 or 271, or
xvi. a nucleotide sequence which encodes for a protein comprising a sequence with at least 80% identity to the sequence of SEQ ID NOs: 268 or 271.

6. The process of claim 1, wherein the resistance locus on chromosome 6 is derived from NC262A.

7. The process of claim 1, the process comprising detecting in the maize plant the presence or absence of at least one allele at the resistance locus on chromosome 6 from claim 1 (b).

8. The process of any one of claims 1-7, wherein the at least one marker at the resistance locus on chromosome 6 detects a “G” at C16759-001-K1.

9. The method of any one of claims 1 to 8, wherein the presence or absence of at least one nucleotide polymorphism is detected by polymerase chain reaction amplification of a nucleic acid present in the maize plant with a primer configured to specifically amplify a nucleic acid sequence comprising one or more of the nucleotide polymorphisms.

10. The method of claim 9, wherein the nucleotide polymorphisms are selected from the group consisting of the variant nucleotides recited in Table 13.

11. The method of any one of claims 1 to 10, wherein the presence or absence of the allele comprising a “G” at C16759-001-K1 is detected by polymerase chain reaction amplification of a nucleic acid present in the maize plant with a primer configured to specifically amplify a nucleic acid sequence of the allele.

12. The method of claim 11, wherein the primer comprises the sequence AATTATGCTGATGA (SEQ ID NO: 413).

13. A process of selecting a maize plant with anthracnose stalk rot resistance, the process comprising identifying the maize plant according to the process of any one of claims 1 to 12, and selecting the maize plant as having anthracnose stalk rot resistance if the presence or absence of the at least one marker at the resistance locus on chromosome 6 is detected.

14. The process of claim 13, further comprising selecting the maize plant that comprises at least one additional marker allele that is closely linked to and associated with the nucleotide polymorphism(s).

15. The process of claim 14, wherein the additional marker allele is linked to the single nucleotide polymorphism by no more than 2 cM on a single meiosis based genetic map.

16. The process of any one of claims 13 to 15, further comprising selecting the maize plant that comprises at least one additional marker allele that is linked to and associated with the allele comprising a “G” at C16759-001-K1.

17. The process of claim 16, wherein the additional marker allele is linked to the allele comprising a “G” at C16759-001-K1 by no more than 2 cM on a single meiosis based genetic map.

18. The process of any one of claims 13 to 15, further comprising selecting the maize plant that comprises at least one additional marker allele that is linked to and associated with the allele comprising a variant nucleotide polymorphism recited in Table 13.

19. The process of any one of claims 1 to 17, further comprising backcrossing the identified maize plant with another maize plant, preferably comprising backcrossing the resistance locus on chromosome 6 into a genotype which is not NC262A.

20. A method of introgressing an allele associated with anthracnose stalk rot resistance into a maize plant, the method comprising:
a. screening a population with a nucleic acid assay for the detection of at least one marker at a resistance locus on chromosome 6 comprising:
(i) the following single nucleotide polymorphisms
a “C” at C12305-001-K1,
a “C” at C12307-001-K1,
a “G” at C16759-001-K1,
a “G” at C16760-001-K1,
an “A” at C12314-001-K1; and/or
(ii) one or more of the variant nucleotide polymorphisms recited in Table 13; and
b. selecting from the population at least one maize plant comprising the resistance locus on chromosome 6 or comprising a “G” at C16759-001-K1 and/or one or more of the variant nucleotide polymorphisms recited in Table 13; and
c. crossing the at least one maize plant to a second maize plant;
d. evaluating progeny plants for the presence of the “G” at C16759-001-K1 and/or one or more of the variant nucleotide polymorphisms recited in Table 13; and
e. selecting progeny plants possessing the “G” at C16759-001-K1 and/or one or more of the variant nucleotide polymorphisms recited in Table 13.

21. The method of claim 20, wherein the at least one marker is located within 5 cM of the “G” at C16759-001-K1.

22. The method of claim 20, wherein the at least one marker is located within 1 cM of the “G” at C16759-001-K1.

23. The method of claim 20, wherein the resistance locus on chromosome 6 is located on a chromosomal interval between makers PZE-106066805 and PZE-106075546.

24. The method of claim 20, wherein the resistance locus on chromosome 6 is located on a chromosomal interval between 139646631 and 139889078 numbered according to the B73AGPv05 genome sequence.

25. The method of claim 20, wherein the resistance locus of chromosome 6 comprises SEQ ID NO: 272, or a fragment thereof.

26. The method of claim 20, wherein the resistance locus on chromosome 6 comprising one or more nucleotide sequences selected from the group consisting of
ix. a nucleotide sequence of SEQ ID NO:266 or 269,
x. a nucleotide sequence having a coding sequence of SEQ ID NO: 267 or 270,
xi. a nucleotide sequence which is complementary to a sequence from i. or ii.,
xii. a nucleotide sequence which has at least 80% identity with a sequence from i., ii. or iii.,
xiii. a nucleotide sequence which differs from a nucleic acid sequence according to i., ii. or iii. depending on the degeneracy of the genetic code,
xiv. a nucleotide sequence which hybridizes with a nucleic acid sequence according to i., ii. or iii. under stringent conditions,
xv. a nucleotide sequence which encodes for a protein comprising the sequence of SEQ ID NOs: 268 or 271, or
xvi. a nucleotide sequence which encodes for a protein comprising a sequence with at least 80% sequence identity to the sequence of SEQ ID NO: 268 or 271.

27. The method of claim 20, wherein the resistance locus on chromosome 6 is derived from NC262A.

28. A method of selecting a maize plant that displays resistance to anthracnose stalk rot, the method comprising:
a. obtaining a first maize plant that comprises within its genome a haplotype comprising one or more of the following single nucleotide polymorphisms
a “C” at C12305-001-K1,
a “C” at C12307-001-K1,
a “G” at C16759-001-K1,
a “G” at C16760-001-K1,
an “A” at C12314-001-K1; and/or
one or more of a variant nucleotide polymorphism recited in Table 13; and
b. crossing the first maize plant to a second maize plant;
c. evaluating progeny plants for the haplotype in a. or at least one marker allele linked to and associated with the haplotype in b.; and
d. selecting progeny plants that possess the haplotype in a.

29. The method of claim 28, wherein the first maize plant is obtained in (a) that comprises within its genome a haplotype comprising one or more of a “G” at C16759-001-K1, or a variant nucleotide polymorphism recited in Table 13.

30. A nucleic acid molecule comprising one or more nucleotide sequences selected from the group consisting of
ix. a nucleotide sequence of SEQ ID NO: 266, 267, 269, 270 or 272,
x. a nucleotide sequence having a coding sequence of SEQ ID NO: 212 or 215,
xi. a nucleotide sequence which is complementary to a sequence from i. or ii.,
xii. a nucleotide sequence with at least 80% identity to a sequence from i., ii. or iii.,
xiii. a nucleotide sequence which differs from a nucleic acid sequence according to i., ii. or iii. depending on the degeneracy of the genetic code,
xiv. a nucleotide sequence which hybridizes with a nucleic acid sequence according to i., ii. or iii. under stringent conditions,
xv. a nucleotide sequence which encodes for a protein comprising the sequence of SEQ ID NO: 268 or 271, or
xvi. a nucleotide sequence which encodes for a protein comprising a sequence with at least 80% identity to the sequence of SEQ ID NOs: 268 or 271.

31. An expression cassette comprising the nucleic acid molecule of claim 30 operatively linked to heterologous regulatory element, preferably to a heterologous promoter.

32. A method for conferring or increasing resistance to anthracnose stalk rot in a maize plant, the method comprising the following steps:
(d) introducing or introgressing into at least one cell of a maize plant the nucleic acid molecule of claim 30;
(e) optionally regenerating or growing a plant from the at least one cell, and
(f) causing expression of the nucleic acid molecule in the plant.

33. A method for manufacturing a maize plant having anthracnose stalk rot resistance, comprising the following steps:
(a) introducing or introgressing into at least one cell of a maize plant the nucleic acid molecule of claim 30, or the expression cassette of claim 31; or
(b.1) introducing of a site-directed nuclease and a repair matrix into at least one cell of a maize plant, wherein the site-directed nuclease is able to generate at least one double-strand break of the DNA in the genome of the at least one cell and the repair matrix comprises the nucleic acid molecule of claim 30 or a fragment thereof,
(b.2) cultivation of the at least one cell of (b.1) under conditions that allow a homology-directed repair or a homologous recombination, wherein the nucleic acid molecule is integrated from the repair matrix into the genome of the maize plant; and
(c) obtaining the plant having anthracnose stalk rot resistance from the at least one cell.

34. The method according to claim 33, wherein the site-directed nuclease comprises a zinc-finger nuclease, a transcription activator-like effector nuclease, a CRISPR/Cas system, including a CRISPR/Cas9 system, a CRISPR/Cpf1 system, a CRISPR/CasX system, a CRISPR/CasY system, an engineered homing endonuclease, and a meganuclease, and/or any combination, variant, or catalytically active fragment thereof.

35. A maize plant identified according to the process of any one of claims 1-19, or manufactured according to the method of claim 33 or claim 34.

36. A maize plant comprising a resistance locus associated with anthracnose stalk rot resistance, wherein the maize plant is prepared by a process comprising introgressing the resistance locus into the maize plant according to the method of any one of claims 20-27.

37. A maize plant comprising a resistance locus associated with anthracnose stalk rot resistance, wherein the maize plant is prepared by a process comprising introgressing the nucleic acid molecule of claim 30 into the maize plant.

38. A maize plant comprising a resistance locus associated with anthracnose stalk rot resistance, wherein the maize plant is prepared by a process comprising introducing the nucleic acid molecule of claim 30 into the maize plant.

39. A seed or plant part of the maize plant of any one of claims 35-38.
